(19) United States
(12) Patent Application Publication
(10) Pub. No.: US 2005/0239731 A1
(43) Pub. Date: Oct. 27, 2005

(54) RNA interference mediated inhibition of MAP kinase gene expression using short interfering nucleic acid (siNA)

(75) Inventors: James McSwiggen, Boulder, CO (US); Bharat M. Chowrira, Louisville, CO (US); Peter Haeberli, Berthoud, CO (US); Leonid Beigelman, Longmont, CO (US); Nassim Usman, Lafayette, CO (US)

Correspondence Address: MCDONNELL BOEHNEN HULBERT & BERGHOFF LLP, 300 S. WACKER DRIVE, 32ND FLOOR, CHICAGO, IL, 60606, US

(73) Assignee: Sirna Therapeutics, Inc., Boulder, CO (US)

(21) Appl. No.: 10/923,379

(22) Filed: Aug. 20, 2004

Related U.S. Application Data
(63) Continuation-in-part of application No. PCT/US04/12517, filed on Apr. 23, 2004.
Application No. PCT/US04/12517 is a continuation-in-part of application No. 10/424,339, filed on Apr. 25, 2003.
Application No. 10/424,339 is a continuation-in-part of application No. PCT/US03/02510, filed on Jan. 28, 2003.
(63) Continuation-in-part of application No. PCT/US04/16390, filed on May 24, 2004.
Application No. PCT/US04/16390 is a continuation-in-part of application No. 10/826,966, filed on Apr. 16, 2004.
Application No. 10/826,966 is a continuation-in-part of application No. 10/757,803, filed on Jan. 14, 2004.
Application No. 10/757,803 is a continuation-in-part of application No. 10/720,448, filed on Nov. 24, 2003.
Application No. 10/720,448 is a continuation-in-part of application No. 10/693,059, filed on Oct. 23, 2003.
Application No. 10/693,059 is a continuation-in-part of application No. 10/444,853, filed on May 23, 2003.
Application No. 10/444,853 is a continuation-in-part of application No. PCT/US03/05346, filed on Feb. 20, 2003.
Application No. 10/444,853 is a continuation-in-part of application No. PCT/US03/05028, filed on Feb. 20, 2003.
(63) Continuation-in-part of application No. PCT/US04/13456, filed on Apr. 30, 2004.
Application No. PCT/US04/13456 is a continuation-in-part of application No. 10/780,447, filed on Feb. 13, 2004.
Application No. 10/780,447 is a continuation-in-part of application No. 10/427,160, filed on Apr. 30, 2003.
Application No. 10/427,160 is a continuation-in-part of application No. PCT/US02/15876, filed on May 17, 2002.
(63) Continuation-in-part of application No. 10/727,780, filed on Dec. 3, 2003.
(60) Provisional application No. 60/358,580, filed on Feb. 20, 2002.
(60) Provisional application No. 60/358,580, filed on Feb. 20, 2002.
(60) Provisional application No. 60/363,124, filed on Mar. 11, 2002.
(60) Provisional application No. 60/363,124, filed on Mar. 11, 2002.
(60) Provisional application No. 60/386,782, filed on Jun. 6, 2002.
(60) Provisional application No. 60/386,782, filed on Jun. 6, 2002.
(60) Provisional application No. 60/406,784, filed on Aug. 29, 2002.
(60) Provisional application No. 60/406,784, filed on Aug. 29, 2002.
(60) Provisional application No. 60/408,378, filed on Sep. 5, 2002.
(60) Provisional application No. 60/408,378, filed on Sep. 5, 2002.
(60) Provisional application No. 60/409,293, filed on Sep. 9, 2002.
(60) Provisional application No. 60/409,293, filed on Sep. 9, 2002.
(60) Provisional application No. 60/440,129, filed on Jan. 15, 2003.
(60) Provisional application No. 60/440,129, filed on Jan. 15, 2003.
(60) Provisional application No. 60/292,217, filed on May 18, 2001.
(60) Provisional application No. 60/362,016, filed on Mar. 6, 2002.
(60) Provisional application No. 60/306,883, filed on Jul. 20, 2001.
(60) Provisional application No. 60/311,865, filed on Aug. 13, 2001.
(60) Provisional application No. 60/543,480, filed on Feb. 10, 2004.

(51) Int. Cl. A61K 48/00; C07H 21/02

(52) U.S. Cl. 514/44; 536/23.1

(57) ABSTRACT

This invention relates to compounds, compositions, and methods useful for modulating mitogen activated protein kinase (MAP kinase) gene expression using short interfering nucleic acid (siNA) molecules. This invention also relates to compounds, compositions, and methods useful for modulating the expression and activity of other genes involved in pathways of MAP kinase gene expression and/or activity by RNA interference (RNAi) using small nucleic acid molecules. In particular, the instant invention features small nucleic acid molecules, such as short interfering nucleic acid (siNA), short interfering RNA (siRNA), double-stranded RNA (dsRNA), micro-RNA (miRNA), and short hairpin RNA (shRNA) molecules and methods used to modulate the expression of MAP kinase genes, such as Jun amino-terminal kinase (e.g., JNK-1, JNK-2), p38 (MAPK 14), ERK (e.g., ERK-1, ERK-2) and/or c-Jun.

[0001] This application is a continuation-in-part of International PCT Application No. PCT/US04/12517, filed Apr. 23, 2004, which is a continuation-in-part of U.S. patent application Ser. No. 10/424,339, filed Apr. 25, 2003, which is a continuation-in-part of International PCT Application No. PCT/US03/02510, filed Jan. 28, 2003. This application is also a continuation-in-part of International Patent Application No. PCT/US04/16390, filed May 24, 2004, which is a continuation-in-part of U.S. patent application Ser. No. 10/826,966, filed Apr. 16, 2004, which is continuation-in-part of U.S. patent application Ser. No. 10/757,803, filed Jan. 14, 2004, which is a continuation-in-part of U.S. patent application Ser. No. 10/720,448, filed Nov. 24, 2003, which is a continuation-in-part of U.S. patent application Ser. No. 10/693,059, filed Oct. 23, 2003, which is a continuation-in-part of U.S. patent application Ser. No. 10/444,853, filed May 23, 2003, which is a continuation-in-part of International Patent Application No. PCT/US03/05346, filed Feb. 20, 2003, and a continuation-in-part of International Patent Application No. PCT/US03/05028, filed Feb. 20, 2003, both of which claim the benefit of U.S. Provisional Application No. 60/358,580 filed Feb. 20, 2002, U.S. Provisional Application No. 60/363,124 filed Mar. 11, 2002, U.S. Provisional Application No. 60/386,782 filed Jun. 6, 2002, U.S. Provisional Application No. 60/406,784 filed Aug. 29, 2002, U.S. Provisional Application No. 60/408,378 filed Sep. 5, 2002, U.S. Provisional Application No. 60/409,293 filed Sep. 9, 2002, and U.S. Provisional Application No. 60/440,129 filed Jan. 15, 2003. This application is also a continuation-in-part of International Patent Application No. PCT/US04/13456, filed Apr. 30, 2004, which is a continuation-in-part of U.S. patent application Ser. No. 10/780,447, filed Feb. 13, 2004, which is a continuation-in-part of U.S. patent application Ser. No. 10/427,160, filed Apr. 30, 2003, which is a continuation-in-part of International Patent Application No. PCT/US02/15876 filed May 17, 2002, which claims the benefit of U.S. Provisional Application No. 60/292,217, filed May 18, 2001, U.S. Provisional Application No. 60/362,016, filed Mar. 6, 2002, U.S. Provisional Application No. 60/306,883, filed Jul. 20, 2001, and U.S. Provisional Application No. 60/311,865, filed Aug. 13, 2001. This application is also a continuation-in-part of U.S. patent application Ser. No. 10/727,780 filed Dec. 3, 2003. This application also claims the benefit of U.S. Provisional Application No. 60/543,480, filed Feb. 10, 2004. The instant application claims the benefit of all the listed applications, which are hereby incorporated by reference herein in their entireties, including the drawings.

### FIELD OF THE INVENTION

[0002] The present invention relates to compounds, compositions, and methods for the study, diagnosis, and treatment of traits, diseases and conditions that respond to the modulation of mitogen activated protein kinase (MAP kinase) gene expression and/or activity. The present invention is also directed to compounds, compositions, and methods relating to traits, diseases and conditions that respond to the modulation of expression and/or activity of genes involved in MAP kinase gene expression pathways or other cellular processes that mediate the maintenance or development of such traits, diseases and conditions. Specifically, the invention relates to small nucleic acid molecules, such as short interfering nucleic acid (siNA), short interfering RNA (siRNA), double-stranded RNA (dsRNA), micro-RNA (miRNA), and short hairpin RNA (shRNA) molecules capable of mediating RNA interference (RNAi) against MAP kinase gene expression, such as Jun amino-terminal kinase (e.g., JNK-1, JNK-2), p38 (MAPK 14), ERK (e.g., ERK-1, ERK-2) and/or c-Jun gene expression. Such small nucleic acid molecules are useful, for example, in providing compositions for treatment of traits, diseases and conditions that can respond to modulation of MAP kinase expression in a subject, such as cancer, inflammatory, autoimmune, neuroligic, ocular, respiratory, allergic, and/or proliferative diseases, disorders, and/or conditions.

### BACKGROUND OF THE INVENTION

[0003] The following is a discussion of relevant art pertaining to RNAi. The discussion is provided only for understanding of the invention that follows. The summary is not an admission that any of the work described below is prior art to the claimed invention.

[0004] RNA interference refers to the process of sequence-specific post-transcriptional gene silencing in animals mediated by short interfering RNAs (siRNAs) (Zamore et al., 2000, Cell, 101, 25-33; Fire et al., 1998, Nature, 391, 806; Hamilton et al., 1999, Science, 286, 950-951; Lin et al., 1999, Nature, 402, 128-129; Sharp, 1999, Genes & Dev., 13:139-141; and Strauss, 1999, Science, 286, 886). The corresponding process in plants (Heifetz et al., International PCT Publication No. WO 99/61631) is commonly referred to as post-transcriptional gene silencing or RNA silencing and is also referred to as quelling in fungi. The process of post-transcriptional gene silencing is thought to be an evolutionarily-conserved cellular defense mechanism used to prevent the expression of foreign genes and is commonly shared by diverse flora and phyla (Fire et al., 1999, Trends Genet., 15, 358). Such protection from foreign gene expression may have evolved in response to the production of double-stranded RNAs (dsRNAs) derived from viral infection or from the random integration of transposon elements into a host genome via a cellular response that specifically destroys homologous single-stranded RNA or viral genomic RNA. The presence of dsRNA in cells triggers the RNAi response through a mechanism that has yet to be fully characterized. This mechanism appears to be different from other known mechanisms involving double stranded RNA-specific ribonucleases, such as the interferon response that results from dsRNA-mediated activation of protein kinase PKR and 2′,5′-oligoadenylate synthetase resulting in non-specific cleavage of mRNA by ribonuclease L (see for example U.S. Pat. Nos. 6,107,094; 5,898,031; Clemens et al., 1997, J. Interferon & Cytokine Res., 17, 503-524; Adah et al., 2001, Curr. Med. Chem., 8, 1189).

[0005] The presence of long dsRNAs in cells stimulates the activity of a ribonuclease III enzyme referred to as dicer (Bass, 2000, Cell, 101, 235; Zamore et al., 2000, Cell, 101, 25-33; Hammond et al., 2000, Nature, 404, 293). Dicer is involved in the processing of the dsRNA into short pieces of dsRNA known as short interfering RNAs (siRNAs) (Zamore et al., 2000, Cell, 101, 25-33; Bass, 2000, Cell, 101, 235; Berstein et al., 2001, Nature, 409, 363). Short interfering RNAs derived from dicer activity are typically about 21 to about 23 nucleotides in length and comprise about 19 base pair duplexes (Zamore et al., 2000, Cell, 101, 25-33; Elbashir et al., 2001, Genes Dev., 15, 188). Dicer has also been implicated in the excision of 21- and 22-nucleotide small temporal RNAs (stRNAs) from precursor RNA of conserved structure that are implicated in translational control (Hutvagner et al., 2001, Science, 293, 834). The RNAi response also features an endonuclease complex, commonly referred to as an RNA-induced silencing complex (RISC), which mediates cleavage of single-stranded RNA having sequence complementary to the antisense strand of the siRNA duplex. Cleavage of the target RNA takes place in the middle of the region complementary to the antisense strand of the siRNA duplex (Elbashir et al., 2001, Genes Dev., 15, 188).

[0006] RNAi has been studied in a variety of systems. Fire et al., 1998, Nature, 391, 806, were the first to observe RNAi in C. elegans. Bahramian and Zarbl, 1999, Molecular and Cellular Biology, 19, 274-283 and Wianny and Goetz, 1999, Nature Cell Biol., 2, 70, describe RNAi mediated by dsRNA in mammalian systems. Hammond et al., 2000, Nature, 404, 293, describe RNAi in Drosophila cells transfected with dsRNA. Elbashir et al., 2001, Nature, 411, 494 and Tuschl et al., International PCT Publication No. WO 01/75164, describe RNAi induced by introduction of duplexes of synthetic 21-nucleotide RNAs in cultured mammalian cells including human embryonic kidney and HeLa cells. Recent work in Drosophila embryonic lysates (Elbashir et al., 2001, EMBO J, 20, 6877 and Tuschl et al., International PCT Publication No. WO 01/75164) has revealed certain requirements for siRNA length, structure, chemical composition, and sequence that are essential to mediate efficient RNAi activity. These studies have shown that 21-nucleotide siRNA duplexes are most active when containing 3′-terminal dinucleotide overhangs. Furthermore, complete substitution of one or both siRNA strands with 2′-deoxy (2′-H) or 2′-O-methyl nucleotides abolishes RNAi activity, whereas substitution of the 3′-terminal siRNA overhang nucleotides with 2′-deoxy nucleotides (2′-H) was shown to be tolerated. Single mismatch sequences in the center of the siRNA duplex were also shown to abolish RNAi activity. In addition, these studies also indicate that the position of the cleavage site in the target RNA is defined by the 5′-end of the siRNA guide sequence rather than the 3′-end of the guide sequence (Elbashir et al., 2001, EMBO J, 20, 6877). Other studies have indicated that a 5′-phosphate on the target-complementary strand of a siRNA duplex is required for siRNA activity and that ATP is utilized to maintain the 5′-phosphate moiety on the siRNA (Nykanen et al., 2001, Cell, 107, 309).

[0007] Studies have shown that replacing the 3′-terminal nucleotide overhanging segments of a 21-mer siRNA duplex having two-nucleotide 3′-overhangs with deoxyribonucleotides does not have an adverse effect on RNAi activity. Replacing up to four nucleotides on each end of the siRNA with deoxyribonucleotides has been reported to be well tolerated, whereas complete substitution with deoxyribonucleotides results in no RNAi activity (Elbashir et al., 2001, EMBO J., 20, 6877 and Tuschl et al., International PCT Publication No. WO 01/75164). In addition, Elbashir et al., supra, also report that substitution of siRNA with 2′-O-methyl nucleotides completely abolishes RNAi activity. Li et al., International PCT Publication No. WO 00/44914, and Beach et al., International PCT Publication No. WO 01/68836 preliminarily suggest that siRNA may include modifications to either the phosphate-sugar backbone or the nucleoside to include at least one of a nitrogen or sulfur heteroatom, however, neither application postulates to what extent such modifications would be tolerated in siRNA molecules, nor provides any further guidance or examples of such modified siRNA. Kreutzer et al., Canadian Patent Application No. 2,359,180, also describe certain chemical modifications for use in dsRNA constructs in order to counteract activation of double-stranded RNA-dependent protein kinase PKR, specifically 2′-amino or 2′-O-methyl nucleotides, and nucleotides containing a 2′-O or 4′-C methylene bridge. However, Kreutzer et al. similarly fails to provide examples or guidance as to what extent these modifications would be tolerated in dsRNA molecules.

[0008] Parrish et al., 2000, Molecular Cell, 6, 1077-1087, tested certain chemical modifications targeting the unc-22 gene in C. elegans using long (>25 nt) siRNA transcripts. The authors describe the introduction of thiophosphate residues into these siRNA transcripts by incorporating thiophosphate nucleotide analogs with T7 and T3 RNA polymerase and observed that RNAs with two phosphorothioate modified bases also had substantial decreases in effectiveness as RNAi. Further, Parrish et al. reported that phosphorothioate modification of more than two residues greatly destabilized the RNAs in vitro such that interference activities could not be assayed. Id. at 1081. The authors also tested certain modifications at the 2′-position of the nucleotide sugar in the long siRNA transcripts and found that substituting deoxynucleotides for ribonucleotides produced a substantial decrease in interference activity, especially in the case of Uridine to Thymidine and/or Cytidine to deoxy-Cytidine substitutions. Id. In addition, the authors tested certain base modifications, including substituting, in sense and antisense strands of the siRNA, 4-thiouracil, 5-bromouracil, 5-iodouracil, and 3-(aminoallyl)uracil for uracil, and inosine for guanosine. Whereas 4-thiouracil and 5-bromouracil substitution appeared to be tolerated, Parrish reported that inosine produced a substantial decrease in interference activity when incorporated in either strand. Parrish also reported that incorporation of 5-iodouracil and 3-(aminoallyl)uracil in the antisense strand resulted in a substantial decrease in RNAi activity as well.

[0009] The use of longer dsRNA has been described. For example, Beach et al., International PCT Publication No. WO 01/68836, describes specific methods for attenuating gene expression using endogenously-derived dsRNA. Tuschl et al., International PCT Publication No. WO 01/75164, describe a Drosophila in vitro RNAi system and the use of specific siRNA molecules for certain functional genomic and certain therapeutic applications; although Tuschl, 2001, Chem. Biochem., 2, 239-245, doubts that RNAi can be used to cure genetic diseases or viral infection due to the danger of activating interferon response. Li et al., International PCT Publication No. WO 00/44914, describe the use of specific long (141 bp-488 bp) enzymatically synthesized or vector expressed dsRNAs for attenuating the expression of certain target genes. Zernicka-Goetz et al., International PCT Publication No. WO 01/36646, describe certain methods for inhibiting the expression of particular genes in mammalian cells using certain long (550 bp-714 bp), enzymatically synthesized or vector expressed dsRNA molecules. Fire et al., International PCT Publication No. WO 99/32619, describe particular methods for introducing certain long dsRNA molecules into cells for use in inhibiting gene expression in nematodes. Plaetinck et al., International PCT Publication No. WO 00/01846, describe certain methods for identifying specific genes responsible for conferring a particular phenotype in a cell using specific long dsRNA molecules. Mello et al., International PCT Publication No. WO 01/29058, describe the identification of specific genes involved in dsRNA-mediated RNAi. Pachuck et al., International PCT Publication No. WO 00/63364, describe certain long (at least 200 nucleotide) dsRNA constructs. Deschamps Depaillette et al., International PCT Publication No. WO 99/07409, describe specific compositions consisting of particular dsRNA molecules combined with certain anti-viral agents. Waterhouse et al., International PCT Publication No. 99/53050 and 1998, PNAS, 95, 13959-13964, describe certain methods for decreasing the phenotypic expression of a nucleic acid in plant cells using certain dsRNAs. Driscoll et al., International PCT Publication No. WO 01/49844, describe specific DNA expression constructs for use in facilitating gene silencing in targeted organisms.

[0010] Others have reported on various RNAi and gene-silencing systems. For example, Parrish et al., 2000, Molecular Cell, 6, 1077-1087, describe specific chemically-modified dsRNA constructs targeting the unc-22 gene of C. elegans. Grossniklaus, International PCT Publication No. WO 01/38551, describes certain methods for regulating polycomb gene expression in plants using certain dsRNAs. Churikov et al., International PCT Publication No. WO 01/42443, describe certain methods for modifying genetic characteristics of an organism using certain dsRNAs. Cogoni et al., International PCT Publication No. WO 01/53475, describe certain methods for isolating a Neurospora silencing gene and uses thereof. Reed et al., International PCT Publication No. WO 01/68836, describe certain methods for gene silencing in plants. Honer et al., International PCT Publication No. WO 01/70944, describe certain methods of drug screening using transgenic nematodes as Parkinson's Disease models using certain dsRNAs. Deak et al., International PCT Publication No. WO 01/72774, describe certain Drosophila-derived gene products that may be related to RNAi in Drosophila. Arndt et al., International PCT Publication No. WO 01/92513 describe certain methods for mediating gene suppression by using factors that enhance RNAi. Tuschl et al., International PCT Publication No. WO 02/44321, describe certain synthetic siRNA constructs. Pachuk et al., International PCT Publication No. WO 00/63364, and Satishchandran et al., International PCT Publication No. WO 01/04313, describe certain methods and compositions for inhibiting the function of certain polynucleotide sequences using certain long (over 250 bp), vector expressed dsRNAs. Echeverri et al., International PCT Publication No. WO 02/38805, describe certain C. elegans genes identified via RNAi. Kreutzer et al., International PCT Publications Nos. WO 02/055692, WO 02/055693, and EP 1144623 B1 describes certain methods for inhibiting gene expression using dsRNA. Graham et al., International PCT Publications Nos. WO 99/49029 and WO 01/70949, and AU 4037501 describe certain vector expressed siRNA molecules. Fire et al., U.S. Pat. No. 6,506,559, describe certain methods for inhibiting gene expression in vitro using certain long dsRNA (299 bp-1033 bp) constructs that mediate RNAi. Martinez et al., 2002, Cell, 110, 563-574, describe certain single stranded siRNA constructs, including certain 5′-phosphorylated single stranded siRNAs that mediate RNA interference in Hela cells. Harborth et al., 2003, Antisense & Nucleic Acid Drug Development, 13, 83-105, describe certain chemically and structurally modified siRNA molecules. Chiu and Rana, 2003, RNA, 9, 1034-1048, describe certain chemically and structurally modified siRNA molecules. Woolf et al., International PCT Publication Nos. WO 03/064626 and WO 03/064625 describe certain chemically modified dsRNA constructs.

### SUMMARY OF THE INVENTION

[0011] This invention relates to compounds, compositions, and methods useful for modulating mitogen activated protein kinase (MAP kinase) gene expression using short interfering nucleic acid (siNA) molecules. This invention also relates to compounds, compositions, and methods useful for modulating the expression and activity of other genes involved in pathways of MAP kinase gene expression and/or activity by RNA interference (RNAi) using small nucleic acid molecules. In particular, the instant invention features small nucleic acid molecules, such as short interfering nucleic acid (siNA), short interfering RNA (siRNA), double-stranded RNA (dsRNA), micro-RNA (miRNA), and short hairpin RNA (shRNA) molecules and methods used to modulate the expression of MAP kinase genes, such as c-JUN, JNK (e.g., JNK1 and JNK2), ERK (e.g., ERK1 and ERK2), and p39 (MAPK3) genes.

[0012] A siNA of the invention can be unmodified or chemically-modified. A siNA of the instant invention can be chemically synthesized, expressed from a vector or enzymatically synthesized. The instant invention also features various chemically-modified synthetic short interfering nucleic acid (siNA) molecules capable of modulating MAP kinase gene expression or activity in cells by RNA interference (RNAi). The use of chemically-modified siNA improves various properties of native siNA molecules through increased resistance to nuclease degradation in vivo and/or through improved cellular uptake. Further, contrary to earlier published studies, siNA having multiple chemical modifications retains its RNAi activity. The siNA molecules of the instant invention provide useful reagents and methods for a variety of therapeutic, veterinary, diagnostic, target validation, genomic discovery, genetic engineering, and pharmacogenomic applications.

[0013] In one embodiment, the invention features one or more siNA molecules and methods that independently or in combination modulate the expression of MAP kinase genes encoding proteins, such as proteins comprising MAP kinase associated with the maintenance and/or development of cancer, inflammatory, autoimmune, neuroligic, ocular, respiratory, allergic, and/or proliferative diseases, traits, conditions and disorders, such as genes encoding sequences comprising those sequences referred to by GenBank Accession Nos. shown in Table I, referred to herein generally as mitogen activated protein kinase or MAP kinase. The description below of the various aspects and embodiments of the invention is provided with reference to exemplary MAP kinase genes, such as JNK1 (also referred to as MAPK8, for example Genbank Accession No. NM_{—}002750), p38 (also referred to as MAPK14, for example Genbank Accession No. NM_{—}139012), ERK2 (also referred to as MAPK1, for example Genbank Accession No. NM_{—}002745), and ERK1 (also referred to as MAPK3, for example Genbank Accession XM_{—}055766) genes. However, the various aspects and embodiments are also directed to other MAP kinases referred to by Accession number in Table I and other genes involved in MAP kinase pathways such as those genes encoding c-JUN (for example Genbank Accession No. NM_{—}002228), TNF-alpha (for example Genbank Accession No. M10988), interleukins such as IL-8 (for example Genbank Accession No. M68932), and activating proteins such as AP-1 (for example Genbank Accession No. NM_{—}013277). The various aspects and embodiments are also directed to other MAP kinase genes, such as homolog genes and transcript variants, and polymorphisms (e.g., single nucleotide polymorphism, (SNPs)) associated with certain MAP kinase genes. As such, the various aspects and embodiments are also directed to other genes that are involved in MAP kinase mediated pathways of signal transduction or gene expression that are involved, for example, in the maintenance or development of diseases, traits, or conditions described herein. These additional genes can be analyzed for target sites using the methods described for MAP kinase genes herein. Thus, the modulation of other genes and the effects of such modulation of the other genes can be performed, determined, and measured as described herein.

[0014] In one embodiment, the invention features a double-stranded short interfering nucleic acid (siNA) molecule that down-regulates expression of a MAP kinase gene, wherein said siNA molecule comprises about 15 to about 28 base pairs.

[0015] In one embodiment, the invention features a double stranded short interfering nucleic acid (siNA) molecule that directs cleavage of a MAP kinase RNA via RNA interference (RNAi), wherein the double stranded siNA molecule comprises a first and a second strand, each strand of the siNA molecule is about 18 to about 28 nucleotides in length, the first strand of the siNA molecule comprises nucleotide sequence having sufficient complementarity to the MAP kinase RNA for the siNA molecule to direct cleavage of the MAP kinase RNA via RNA interference, and the second strand of said siNA molecule comprises nucleotide sequence that is complementary to the first strand.

[0016] In one embodiment, the invention features a double stranded short interfering nucleic acid (siNA) molecule that directs cleavage of a MAP kinase RNA via RNA interference (RNAi), wherein the double stranded siNA molecule comprises a first and a second strand, each strand of the siNA molecule is about 18 to about 23 nucleotides in length, the first strand of the siNA molecule comprises nucleotide sequence having sufficient complementarity to the MAP kinase RNA for the siNA molecule to direct cleavage of the MAP kinase RNA via RNA interference, and the second strand of said siNA molecule comprises nucleotide sequence that is complementary to the first strand.

[0017] In one embodiment, the invention features a chemically synthesized double stranded short interfering nucleic acid (siNA) molecule that directs cleavage of a MAP kinase RNA via RNA interference (RNAi), wherein each strand of the siNA molecule is about 18 to about 28 nucleotides in length; and one strand of the siNA molecule comprises nucleotide sequence having sufficient complementarity to the MAP kinase RNA for the siNA molecule to direct cleavage of the MAP kinase RNA via RNA interference.

[0018] In one embodiment, the invention features a chemically synthesized double stranded short interfering nucleic acid (siNA) molecule that directs cleavage of a MAP kinase RNA via RNA interference (RNAi), wherein each strand of the siNA molecule is about 18 to about 23 nucleotides in length; and one strand of the siNA molecule comprises nucleotide sequence having sufficient complementarity to the MAP kinase RNA for the siNA molecule to direct cleavage of the MAP kinase RNA via RNA interference.

[0019] In one embodiment, the invention features a siNA molecule that down-regulates expression of a MAP kinase gene, for example, wherein the MAP kinase gene comprises MAP kinase encoding sequence (e.g., c-JUN, JNK1, JNK2, p38, ERK1, or ERK2). In one embodiment, the invention features a siNA molecule that down-regulates expression of a MAP kinase gene, for example, wherein the MAP kinase gene comprises MAP kinase non-coding sequence or regulatory elements involved in MAP kinase gene expression.

[0020] In one embodiment, a siNA of the invention is used to inhibit the expression of MAP kinase genes or a MAP kinase gene family, wherein the genes or gene family sequences share sequence homology. Such homologous sequences can be identified as is known in the art, for example using sequence alignments. siNA molecules can be designed to target such homologous sequences, for example using perfectly complementary sequences or by incorporating non-canonical base pairs, for example mismatches and/or wobble base pairs, that can provide additional target sequences. In instances where mismatches are identified, non-canonical base pairs (for example, mismatches and/or wobble bases) can be used to generate siNA molecules that target more than one gene sequence. In a non-limiting example, non-canonical base pairs such as UU and CC base pairs are used to generate siNA molecules that are capable of targeting sequences for differing MAP kinase targets that share sequence homology. As such, one advantage of using siNAs of the invention is that a single siNA can be designed to include nucleic acid sequence that is complementary to the nucleotide sequence that is conserved between the homologous genes. In this approach, a single siNA can be used to inhibit expression of more than one gene instead of using more than one siNA molecule to target the different genes.

[0021] In one embodiment, the invention features a siNA molecule having RNAi activity against MAP kinase RNA, wherein the siNA molecule comprises a sequence complementary to any RNA having MAP kinase encoding sequence, such as those sequences having GenBank Accession Nos. shown in Table I. In another embodiment, the invention features a siNA molecule having RNAi activity against MAP kinase RNA, wherein the siNA molecule comprises a sequence complementary to an RNA having variant MAP kinase encoding sequence, for example other mutant MAP kinase genes not shown in Table I but known in the art to be associated with the maintenance and/or development of cancer, inflammatory, autoimmune, neuroligic, ocular, respiratory, allergic, and/or proliferative diseases, disorders, and/or conditions. Chemical modifications as shown in Tables III and IV or otherwise described herein can be applied to any siNA construct of the invention. In another embodiment, a siNA molecule of the invention includes a nucleotide sequence that can interact with nucleotide sequence of a MAP kinase gene and thereby mediate silencing of MAP kinase gene expression, for example, wherein the siNA mediates regulation of MAP kinase gene expression by cellular processes that modulate the chromatin structure or methylation patterns of the MAP kinase gene and prevent transcription of the MAP kinase gene.

[0022] In one embodiment, siNA molecules of the invention are used to down regulate or inhibit the expression of MAP kinase proteins arising from MAP kinase haplotype polymorphisms that are associated with a disease or condition, (e.g., cancer, inflammatory, autoimmune, neuroligic, ocular, respiratory, allergic, and/or proliferative diseases, disorders, and/or conditions). Analysis of MAP kinase genes, or MAP kinase protein or RNA levels can be used to identify subjects with such polymorphisms or those subjects who are at risk of developing traits, conditions, or diseases described herein. These subjects are amenable to treatment, for example, treatment with siNA molecules of the invention and any other composition useful in treating diseases related to MAP kinase gene expression. As such, analysis of MAP kinase protein or RNA levels can be used to determine treatment type and the course of therapy in treating a subject. Monitoring of MAP kinase protein or RNA levels can be used to predict treatment outcome and to determine the efficacy of compounds and compositions that modulate the level and/or activity of certain MAP kinase proteins associated with a trait, condition, or disease.

[0023] In one embodiment of the invention a siNA molecule comprises an antisense strand comprising a nucleotide sequence that is complementary to a nucleotide sequence or a portion thereof encoding a MAP kinase protein. The siNA further comprises a sense strand, wherein said sense strand comprises a nucleotide sequence of a MAP kinase gene or a portion thereof.

[0024] In another embodiment, a siNA molecule comprises an antisense region comprising a nucleotide sequence that is complementary to a nucleotide sequence encoding a MAP kinase protein or a portion thereof. The siNA molecule further comprises a sense region, wherein said sense region comprises a nucleotide sequence of a MAP kinase gene or a portion thereof.

[0025] In another embodiment, the invention features a siNA molecule comprising a nucleotide sequence in the antisense region of the siNA molecule that is complementary to a nucleotide sequence or portion of sequence of a MAP kinase gene. In another embodiment, the invention features a siNA molecule comprising a region, for example, the antisense region of the siNA construct, complementary to a sequence comprising a MAP kinase gene sequence or a portion thereof.

[0026] In one embodiment, the antisense region of MAPK 1 siNA constructs can comprise a sequence complementary to sequence having any of SEQ ID NOs. 1-163 and 1475-1482. The antisense region can also comprise sequence having any of SEQ ID NOs. 164-326, 1543-1550, 1559-1566, 1575-1582, 1591-1598, and 1607-1630. In another embodiment, the sense region of ERK2 siNA constructs can comprise sequence having any of SEQ ID NOs. 1-163, 1475-1482, 1535-1542, 1551-1558, 1567-1574, 1583-1590, 1599-1606.

[0027] In one embodiment, the antisense region of ERK1 (MAPK 3) siNA constructs can comprise a sequence complementary to sequence having any of SEQ ID NOs. 327-431 and 1483-1490. The antisense region can also comprise sequence having any of SEQ ID NOs. 432-536, 1639-1646, 1655-1662, 1671-1678, 1687-1694, and 1703-1726. In another embodiment, the sense region of ERK1 siNA constructs can comprise sequence having any of SEQ ID NOs. 327-431, 1483-1490, 1693-1638, 1647-1654, 663-1670, 1679-1686, and 1695-1702.

[0028] In one embodiment, the antisense region of MAPK 8 siNA constructs can comprise a sequence complementary to sequence having any of SEQ ID NOs. 537-615 and 1491-1498. The antisense region can also comprise sequence having any of SEQ ID NOs. 616-694, 1735-1742, 1751-1758, 1767-1774, 1783-1790, 1799-1824. In another embodiment, the sense region of JNK1 constructs can comprise sequence having any of SEQ ID NOs. 537-615, 1491-1498, 1727-1734, 1743-1750, 1759-1766, 1775-1782, and 1791-1798.

[0029] In one embodiment, the antisense region of p38 (MAPK 14) siNA constructs can comprise a sequence complementary to sequence having any of SEQ ID NOs. 695-903 and 1499-1506. The antisense region can also comprise sequence having any of SEQ ID NOs. 904-1112, 1833-1840, 1849-1856, 1865-1872, 1881-1888, 1897-1920. In another embodiment, the sense region of p38 siNA constructs can comprise sequence having any of SEQ ID NOs. 695-903, 1499-1506, 1825-1832, 1841-1848, 1857-1864, 1873-1880, and 1889-1896.

[0030] In one embodiment, the antisense region of c-JUN siNA constructs can comprise a sequence complementary to sequence having any of SEQ ID NOs. 1113-1293 and 1507-1534. In one embodiment, the antisense region of c-JUN siNA constructs can comprise sequence having any of SEQ ID NOs. 1294-1474, 1949-1976, 2005-2032, 2061-2088, 2117-2144, 2173-2256, 2340, 2342, 2344, 2347, 2349, 2351, 2353, and 2356. In another embodiment, the sense region of c-JUN siNA constructs can comprise sequence having any of SEQ ID NOs. 1113-1293, 1507-1534, 1921-1948, 1977-2004, 2033-2060, 2089-2116, 2146-2172, 2257-2260, 2339, 2341, 2343, 2345, 2346, 2348, 2350, 2351, 2352, 2354, and 2355.

[0031] In one embodiment, a siNA molecule of the invention comprises any of SEQ ID NOs. 1-2356. The sequences shown in SEQ ID NOs: 1-2356 are not limiting. A siNA molecule of the invention can comprise any contiguous MAP kinase sequence (e.g., about 15 to about 25 or more, or about 15, 16, 17, 18, 19, 20, 21, 22, 23, 24, or 25 or more contiguous MAP kinase nucleotides).

[0032] In yet another embodiment, the invention features a siNA molecule comprising a sequence, for example, the antisense sequence of the siNA construct, complementary to a sequence or portion of sequence comprising sequence represented by GenBank Accession Nos. shown in Table I. Chemical modifications in Tables III and IV and described herein can be applied to any siNA construct of the invention.

[0033] In one embodiment of the invention a siNA molecule comprises an antisense strand having about 15 to about 30 (e.g., about 15, 16, 17, 18, 19, 20, 21, 22, 23, 24, 25, 26, 27, 28, 29, or 30) nucleotides, wherein the antisense strand is complementary to a RNA sequence or a portion thereof encoding a MAP kinase protein, and wherein said siNA further comprises a sense strand having about 15 to about 30 (e.g., about 15, 16, 17, 18, 19, 20, 21, 22, 23, 24, 25, 26, 27, 28, 29, or 30) nucleotides, and wherein said sense strand and said antisense strand are distinct nucleotide sequences where at least about 15 nucleotides in each strand are complementary to the other strand.

[0034] In another embodiment of the invention a siNA molecule of the invention comprises an antisense region having about 15 to about 30 (e.g., about 15, 16, 17, 18, 19, 20, 21, 22, 23, 24, 25, 26, 27, 28, 29, or 30) nucleotides, wherein the antisense region is complementary to a RNA sequence encoding a MAP kinase protein, and wherein said siNA further comprises a sense region having about 15 to about 30 (e.g., about 15, 16, 17, 18, 19, 20, 21, 22, 23, 24, 25, 26, 27, 28, 29, or 30) nucleotides, wherein said sense region and said antisense region are comprised in a linear molecule where the sense region comprises at least about 15 nucleotides that are complementary to the antisense region.

[0035] In one embodiment, a siNA molecule of the invention has RNAi activity that modulates expression of RNA encoded by a MAP kinase gene. Because MAP kinase genes can share some degree of sequence homology with each other, siNA molecules can be designed to target a class of MAP kinase genes or alternately specific MAP kinase genes (e.g., polymorphic variants) by selecting sequences that are either shared amongst different MAP kinase targets or alternatively that are unique for a specific MAP kinase target. Therefore, in one embodiment, the siNA molecule can be designed to target conserved regions of MAP kinase RNA sequences having homology among several MAP kinase gene variants so as to target a class of MAP kinase genes with one siNA molecule. Accordingly, in one embodiment, the siNA molecule of the invention modulates the expression of one or both MAP kinase alleles in a subject. In another embodiment, the siNA molecule can be designed to target a sequence that is unique to a specific MAP kinase RNA sequence (e.g., a single MAP kinase allele or MAP kinase single nucleotide polymorphism (SNP)) due to the high degree of specificity that the siNA molecule requires to mediate RNAi activity.

[0036] In one embodiment, nucleic acid molecules of the invention that act as mediators of the RNA interference gene silencing response are double-stranded nucleic acid molecules. In another embodiment, the siNA molecules of the invention consist of duplex nucleic acid molecules containing about 15 to about 30 base pairs between oligonucleotides comprising about 15 to about 30 (e.g., about 15, 16, 17, 18, 19, 20, 21, 22, 23, 24, 25, 26, 27, 28, 29, or 30) nucleotides. In yet another embodiment, siNA molecules of the invention comprise duplex nucleic acid molecules with overhanging ends of about 1 to about 3 (e.g., about 1, 2, or 3) nucleotides, for example, about 21-nucleotide duplexes with about 19 base pairs and 3′-terminal mononucleotide, dinucleotide, or trinucleotide overhangs. In yet another embodiment, siNA molecules of the invention comprise duplex nucleic acid molecules with blunt ends, where both ends are blunt, or alternatively, where one of the ends is blunt.

[0037] In one embodiment, the invention features one or more chemically-modified siNA constructs having specificity for MAP kinase expressing nucleic acid molecules, such as RNA encoding a MAP kinase protein. In one embodiment, the invention features a RNA based siNA molecule (e.g., a siNA comprising 2′-OH nucleotides) having specificity for MAP kinase expressing nucleic acid molecules that includes one or more chemical modifications described herein. Non-limiting examples of such chemical modifications include without limitation phosphorothioate internucleotide linkages, 2′-deoxyribonucleotides, 2′-O-methyl ribonucleotides, 2′-deoxy-2′-fluoro ribonucleotides, “universal base” nucleotides, “acyclic” nucleotides, 5-C-methyl nucleotides, and terminal glyceryl and/or inverted deoxy abasic residue incorporation. These chemical modifications, when used in various siNA constructs, (e.g., RNA based siNA constructs), are shown to preserve RNAi activity in cells while at the same time, dramatically increasing the serum stability of these compounds. Furthermore, contrary to the data published by Parrish et al., supra, applicant demonstrates that multiple (greater than one) phosphorothioate substitutions are well-tolerated and confer substantial increases in serum stability for modified siNA constructs.

[0038] In one embodiment, a siNA molecule of the invention comprises modified nucleotides while maintaining the ability to mediate RNAi. The modified nucleotides can be used to improve in vitro or in vivo characteristics such as stability, activity, and/or bioavailability. For example, a siNA molecule of the invention can comprise modified nucleotides as a percentage of the total number of nucleotides present in the siNA molecule. As such, a siNA molecule of the invention can generally comprise about 5% to about 100% modified nucleotides (e.g., about 5%, 10%, 15%, 20%, 25%, 30%, 35%, 40%, 45%, 50%, 55%, 60%, 65%, 70%, 75%, 80%, 85%, 90%, 95% or 100% modified nucleotides). The actual percentage of modified nucleotides present in a given siNA molecule will depend on the total number of nucleotides present in the siNA. If the siNA molecule is single stranded, the percent modification can be based upon the total number of nucleotides present in the single stranded siNA molecules. Likewise, if the siNA molecule is double stranded, the percent modification can be based upon the total number of nucleotides present in the sense strand, antisense strand, or both the sense and antisense strands.

[0039] One aspect of the invention features a double-stranded short interfering nucleic acid (siNA) molecule that down-regulates expression of a MAP kinase gene. In one embodiment, the double stranded siNA molecule comprises one or more chemical modifications and each strand of the double-stranded siNA is about 21 nucleotides long. In one embodiment, the double-stranded siNA molecule does not contain any ribonucleotides. In another embodiment, the double-stranded siNA molecule comprises one or more ribonucleotides. In one embodiment, each strand of the double-stranded siNA molecule independently comprises about 15 to about 30 (e.g., about 15, 16, 17, 18, 19, 20, 21, 22, 23, 24, 25, 26, 27, 28, 29, or 30) nucleotides, wherein each strand comprises about 15 to about 30 (e.g., about 15, 16, 17, 18, 19, 20, 21, 22, 23, 24, 25, 26, 27, 28, 29, or 30) nucleotides that are complementary to the nucleotides of the other strand. In one embodiment, one of the strands of the double-stranded siNA molecule comprises a nucleotide sequence that is complementary to a nucleotide sequence or a portion thereof of the MAP kinase gene, and the second strand of the double-stranded siNA molecule comprises a nucleotide sequence substantially similar to the nucleotide sequence of the MAP kinase gene or a portion thereof.

[0040] In another embodiment, the invention features a double-stranded short interfering nucleic acid (siNA) molecule that down-regulates expression of a MAP kinase gene comprising an antisense region, wherein the antisense region comprises a nucleotide sequence that is complementary to a nucleotide sequence of the MAP kinase gene or a portion thereof, and a sense region, wherein the sense region comprises a nucleotide sequence substantially similar to the nucleotide sequence of the MAP kinase gene or a portion thereof. In one embodiment, the antisense region and the sense region independently comprise about 15 to about 30 (e.g. about 15, 16, 17, 18, 19, 20, 21, 22, 23, 24, 25, 26, 27, 28, 29, or 30) nucleotides, wherein the antisense region comprises about 15 to about 30 (e.g. about 15, 16, 17, 18, 19, 20, 21, 22, 23, 24, 25, 26, 27, 28, 29, or 30) nucleotides that are complementary to nucleotides of the sense region.

[0041] In another embodiment, the invention features a double-stranded short interfering nucleic acid (siNA) molecule that down-regulates expression of a MAP kinase gene comprising a sense region and an antisense region, wherein the antisense region comprises a nucleotide sequence that is complementary to a nucleotide sequence of RNA encoded by the MAP kinase gene or a portion thereof and the sense region comprises a nucleotide sequence that is complementary to the antisense region.

[0042] In one embodiment, a siNA molecule of the invention comprises blunt ends, i.e., ends that do not include any overhanging nucleotides. For example, a siNA molecule comprising modifications described herein (e.g., comprising nucleotides having Formulae I-VII or siNA constructs comprising “Stab 00“−”Stab 32” (Table IV) or any combination thereof (see Table IV)) and/or any length described herein can comprise blunt ends or ends with no overhanging nucleotides.

[0043] In one embodiment, any siNA molecule of the invention can comprise one or more blunt ends, i.e. where a blunt end does not have any overhanging nucleotides. In one embodiment, the blunt ended siNA molecule has a number of base pairs equal to the number of nucleotides present in each strand of the siNA molecule. In another embodiment, the siNA molecule comprises one blunt end, for example wherein the 5′-end of the antisense strand and the 3′-end of the sense strand do not have any overhanging nucleotides. In another example, the siNA molecule comprises one blunt end, for example wherein the 3′-end of the antisense strand and the 5′-end of the sense strand do not have any overhanging nucleotides. In another example, a siNA molecule comprises two blunt ends, for example wherein the 3′-end of the antisense strand and the 5′-end of the sense strand as well as the 5′-end of the antisense strand and 3′-end of the sense strand do not have any overhanging nucleotides. A blunt ended siNA molecule can comprise, for example, from about 15 to about 30 nucleotides (e.g., about 15, 16, 17, 18, 19, 20, 21, 22, 23, 24, 25, 26, 27, 28, 29, or 30 nucleotides). Other nucleotides present in a blunt ended siNA molecule can comprise, for example, mismatches, bulges, loops, or wobble base pairs to modulate the activity of the siNA molecule to mediate RNA interference.

[0044] By “blunt ends” is meant symmetric termini or termini of a double stranded siNA molecule having no overhanging nucleotides. The two strands of a double stranded siNA molecule align with each other without over-hanging nucleotides at the termini. For example, a blunt ended siNA construct comprises terminal nucleotides that are complementary between the sense and antisense regions of the siNA molecule.

[0045] In one embodiment, the invention features a double-stranded short interfering nucleic acid (siNA) molecule that down-regulates expression of a MAP kinase gene, wherein the siNA molecule is assembled from two separate oligonucleotide fragments wherein one fragment comprises the sense region and the second fragment comprises the antisense region of the siNA molecule. The sense region can be connected to the antisense region via a linker molecule, such as a polynucleotide linker or a non-nucleotide linker.

[0046] In one embodiment, the invention features double-stranded short interfering nucleic acid (siNA) molecule that down-regulates expression of a MAP kinase gene, wherein the siNA molecule comprises about 15 to about 30 (e.g. about 15, 16, 17, 18, 19, 20, 21, 22, 23, 24, 25, 26, 27, 28, 29, or 30) base pairs, and wherein each strand of the siNA molecule comprises one or more chemical modifications. In another embodiment, one of the strands of the double-stranded siNA molecule comprises a nucleotide sequence that is complementary to a nucleotide sequence of a MAP kinase gene or a portion thereof, and the second strand of the double-stranded siNA molecule comprises a nucleotide sequence substantially similar to the nucleotide sequence or a portion thereof of the MAP kinase gene. In another embodiment, one of the strands of the double-stranded siNA molecule comprises a nucleotide sequence that is complementary to a nucleotide sequence of a MAP kinase gene or portion thereof, and the second strand of the double-stranded siNA molecule comprises a nucleotide sequence substantially similar to the nucleotide sequence or portion thereof of the MAP kinase gene. In another embodiment, each strand of the siNA molecule comprises about 15 to about 30 (e.g. about 15, 16, 17, 18, 19, 20, 21, 22, 23, 24, 25, 26, 27, 28, 29, or 30) nucleotides, and each strand comprises at least about 15 to about 30 (e.g. about 15, 16, 17, 18, 19, 20, 21, 22, 23, 24, 25, 26, 27, 28, 29, or 30) nucleotides that are complementary to the nucleotides of the other strand. The MAP kinase gene can comprise, for example, sequences referred to in Table I.

[0047] In one embodiment, a siNA molecule of the invention comprises no ribonucleotides. In another embodiment, a siNA molecule of the invention comprises ribonucleotides.

[0048] In one embodiment, a siNA molecule of the invention comprises an antisense region comprising a nucleotide sequence that is complementary to a nucleotide sequence of a MAP kinase gene or a portion thereof, and the siNA further comprises a sense region comprising a nucleotide sequence substantially similar to the nucleotide sequence of the MAP kinase gene or a portion thereof. In another embodiment, the antisense region and the sense region each comprise about 15 to about 30 (e.g. about 15, 16, 17, 18, 19, 20, 21, 22, 23, 24, 25, 26, 27, 28, 29, or 30) nucleotides and the antisense region comprises at least about 15 to about 30 (e.g. about 15, 16, 17, 18, 19, 20, 21, 22, 23, 24, 25, 26, 27, 28, 29, or 30) nucleotides that are complementary to nucleotides of the sense region. The MAP kinase gene can comprise, for example, sequences referred to in Table I. In another embodiment, the siNA is a double stranded nucleic acid molecule, where each of the two strands of the siNA molecule independently comprise about 15 to about 40 (e.g. about 15, 16, 17, 18, 19, 20, 21, 22, 23, 24, 25, 26, 27, 28, 29, 30, 31, 23, 33, 34, 35, 36, 37, 38, 39, or 40) nucleotides, and where one of the strands of the siNA molecule comprises at least about 15 (e.g. about 15, 16, 17, 18, 19, 20, 21, 22, 23, 24 or 25 or more) nucleotides that are complementary to the nucleic acid sequence of the MAP kinase gene or a portion thereof.

[0049] In one embodiment, a siNA molecule of the invention comprises a sense region and an antisense region, wherein the antisense region comprises a nucleotide sequence that is complementary to a nucleotide sequence of RNA encoded by a MAP kinase gene, or a portion thereof, and the sense region comprises a nucleotide sequence that is complementary to the antisense region. In one embodiment, the siNA molecule is assembled from two separate oligonucleotide fragments, wherein one fragment comprises the sense region and the second fragment comprises the antisense region of the siNA molecule. In another embodiment, the sense region is connected to the antisense region via a linker molecule. In another embodiment, the sense region is connected to the antisense region via a linker molecule, such as a nucleotide or non-nucleotide linker. The MAP kinase gene can comprise, for example, sequences referred in to Table I.

[0050] In one embodiment, the invention features a double-stranded short interfering nucleic acid (siNA) molecule that down-regulates expression of a MAP kinase gene comprising a sense region and an antisense region, wherein the antisense region comprises a nucleotide sequence that is complementary to a nucleotide sequence of RNA encoded by the MAP kinase gene or a portion thereof and the sense region comprises a nucleotide sequence that is complementary to the antisense region, and wherein the siNA molecule has one or more modified pyrimidine and/or purine nucleotides. In one embodiment, the pyrimidine nucleotides in the sense region are 2′-O-methylpyrimidine nucleotides or 2′-deoxy-2′-fluoro pyrimidine nucleotides and the purine nucleotides present in the sense region are 2′-deoxy purine nucleotides. In another embodiment, the pyrimidine nucleotides in the sense region are 2′-deoxy-2′-fluoro pyrimidine nucleotides and the purine nucleotides present in the sense region are 2′-O-methyl purine nucleotides. In another embodiment, the pyrimidine nucleotides in the sense region are 2′-deoxy-2′-fluoro pyrimidine nucleotides and the purine nucleotides present in the sense region are 2′-deoxy purine nucleotides. In one embodiment, the pyrimidine nucleotides in the antisense region are 2′-deoxy-2′-fluoro pyrimidine nucleotides and the purine nucleotides present in the antisense region are 2′-O-methyl or 2′-deoxy purine nucleotides. In another embodiment of any of the above-described siNA molecules, any nucleotides present in a non-complementary region of the sense strand (e.g. overhang region) are 2′-deoxy nucleotides.

[0051] In one embodiment, the invention features a double-stranded short interfering nucleic acid (siNA) molecule that down-regulates expression of a MAP kinase gene, wherein the siNA molecule is assembled from two separate oligonucleotide fragments wherein one fragment comprises the sense region and the second fragment comprises the antisense region of the siNA molecule, and wherein the fragment comprising the sense region includes a terminal cap moiety at the 5′-end, the 3′-end, or both of the 5′ and 3′ ends of the fragment. In one embodiment, the terminal cap moiety is an inverted deoxy abasic moiety or glyceryl moiety. In one embodiment, each of the two fragments of the siNA molecule independently comprise about 15 to about 30 (e.g. about 15, 16, 17, 18, 19, 20, 21, 22, 23, 24, 25, 26, 27, 28, 29, or 30) nucleotides. In another embodiment, each of the two fragments of the siNA molecule independently comprise about 15 to about 40 (e.g. about 15, 16, 17, 18, 19, 20, 21, 22, 23, 24, 25, 26, 27, 28, 29, 30, 31, 23, 33, 34, 35, 36, 37, 38, 39, or 40) nucleotides. In a non-limiting example, each of the two fragments of the siNA molecule comprise about 21 nucleotides.

[0052] In one embodiment, the invention features a siNA molecule comprising at least one modified nucleotide, wherein the modified nucleotide is a 2′-deoxy-2′-fluoro nucleotide. The siNA can be, for example, about 15 to about 40 nucleotides in length. In one embodiment, all pyrimidine nucleotides present in the siNA are 2′-deoxy-2′-fluoro pyrimidine nucleotides. In one embodiment, the modified nucleotides in the siNA include at least one 2′-deoxy-2′-fluoro cytidine or 2′-deoxy-2′-fluoro uridine nucleotide. In another embodiment, the modified nucleotides in the siNA include at least one 2′-fluoro cytidine and at least one 2′-deoxy-2′-fluoro uridine nucleotides. In one embodiment, all uridine nucleotides present in the siNA are 2′-deoxy-2′-fluoro uridine nucleotides. In one embodiment, all cytidine nucleotides present in the siNA are 2′-deoxy-2′-fluoro cytidine nucleotides. In one embodiment, all adenosine nucleotides present in the siNA are 2′-deoxy-2′-fluoro adenosine nucleotides. In one embodiment, all guanosine nucleotides present in the siNA are 2′-deoxy-2′-fluoro guanosine nucleotides. The siNA can further comprise at least one modified internucleotidic linkage, such as phosphorothioate linkage. In one embodiment, the 2′-deoxy-2′-fluoronucleotides are present at specifically selected locations in the siNA that are sensitive to cleavage by ribonucleases, such as locations having pyrimidine nucleotides.

[0053] In one embodiment, the invention features a method of increasing the stability of a siNA molecule against cleavage by ribonucleases comprising introducing at least one modified nucleotide into the siNA molecule, wherein the modified nucleotide is a 2′-deoxy-2′-fluoro nucleotide. In one embodiment, all pyrimidine nucleotides present in the siNA are 2′-deoxy-2′-fluoro pyrimidine nucleotides. In one embodiment, the modified nucleotides in the siNA include at least one 2′-deoxy-2′-fluoro cytidine or 2′-deoxy-2′-fluoro uridine nucleotide. In another embodiment, the modified nucleotides in the siNA include at least one 2′-fluoro cytidine and at least one 2′-deoxy-2′-fluoro uridine nucleotides. In one embodiment, all uridine nucleotides present in the siNA are 2′-deoxy-2′-fluoro uridine nucleotides. In one embodiment, all cytidine nucleotides present in the siNA are 2′-deoxy-2′-fluoro cytidine nucleotides. In one embodiment, all adenosine nucleotides present in the siNA are 2′-deoxy-2′-fluoro adenosine nucleotides. In one embodiment, all guanosine nucleotides present in the siNA are 2′-deoxy-2′-fluoro guanosine nucleotides. The siNA can further comprise at least one modified internucleotidic linkage, such as phosphorothioate linkage. In one embodiment, the 2′-deoxy-2′-fluoronucleotides are present at specifically selected locations in the siNA that are sensitive to cleavage by ribonucleases, such as locations having pyrimidine nucleotides.

[0054] In one embodiment, the invention features a double-stranded short interfering nucleic acid (siNA) molecule that down-regulates expression of a MAP kinase gene comprising a sense region and an antisense region, wherein the antisense region comprises a nucleotide sequence that is complementary to a nucleotide sequence of RNA encoded by the MAP kinase gene or a portion thereof and the sense region comprises a nucleotide sequence that is complementary to the antisense region, and wherein the purine nucleotides present in the antisense region comprise 2′-deoxy-purine nucleotides. In an alternative embodiment, the purine nucleotides present in the antisense region comprise 2′-O-methyl purine nucleotides. In either of the above embodiments, the antisense region can comprise a phosphorothioate internucleotide linkage at the 3′ end of the antisense region. Alternatively, in either of the above embodiments, the antisense region can comprise a glyceryl modification at the 3′ end of the antisense region. In another embodiment of any of the above-described siNA molecules, any nucleotides present in a non-complementary region of the antisense strand (e.g. overhang region) are 2′-deoxy nucleotides.

[0055] In one embodiment, the antisense region of a siNA molecule of the invention comprises sequence complementary to a portion of a MAP kinase transcript having sequence unique to a particular MAP kinase disease related allele, such as sequence comprising a single nucleotide polymorphism (SNP) associated with the disease specific allele. As such, the antisense region of a siNA molecule of the invention can comprise sequence complementary to sequences that are unique to a particular allele to provide specificity in mediating selective RNAi against the disease, condition, or trait related allele.

[0056] In one embodiment, the invention features a double-stranded short interfering nucleic acid (siNA) molecule that down-regulates expression of a MAP kinase gene, wherein the siNA molecule is assembled from two separate oligonucleotide fragments wherein one fragment comprises the sense region and the second fragment comprises the antisense region of the siNA molecule. In another embodiment, the siNA molecule is a double stranded nucleic acid molecule, where each strand is about 21 nucleotides long and where about 19 nucleotides of each fragment of the siNA molecule are base-paired to the complementary nucleotides of the other fragment of the siNA molecule, wherein at least two 3′ terminal nucleotides of each fragment of the siNA molecule are not base-paired to the nucleotides of the other fragment of the siNA molecule. In another embodiment, the siNA molecule is a double stranded nucleic acid molecule, where each strand is about 19 nucleotide long and where the nucleotides of each fragment of the siNA molecule are base-paired to the complementary nucleotides of the other fragment of the siNA molecule to form at least about 15 (e.g., 15, 16, 17, 18, or 19) base pairs, wherein one or both ends of the siNA molecule are blunt ends. In one embodiment, each of the two 3′ terminal nucleotides of each fragment of the siNA molecule is a 2′-deoxy-pyrimidine nucleotide, such as a 2′-deoxy-thymidine. In another embodiment, all nucleotides of each fragment of the siNA molecule are base-paired to the complementary nucleotides of the other fragment of the siNA molecule. In another embodiment, the siNA molecule is a double stranded nucleic acid molecule of about 19 to about 25 base pairs having a sense region and an antisense region, where about 19 nucleotides of the antisense region are base-paired to the nucleotide sequence or a portion thereof of the RNA encoded by the MAP kinase gene. In another embodiment, about 21 nucleotides of the antisense region are base-paired to the nucleotide sequence or a portion thereof of the RNA encoded by the MAP kinase gene. In any of the above embodiments, the 5′-end of the fragment comprising said antisense region can optionally include a phosphate group.

[0057] In one embodiment, the invention features a double-stranded short interfering nucleic acid (siNA) molecule that inhibits the expression of a MAP kinase RNA sequence (e.g., wherein said target RNA sequence is encoded by a MAP kinase gene involved in the MAP kinase pathway), wherein the siNA molecule does not contain any ribonucleotides and wherein each strand of the double-stranded siNA molecule is about 15 to about 30 nucleotides. In one embodiment, the siNA molecule is 21 nucleotides in length. Examples of non-ribonucleotide containing siNA constructs are combinations of stabilization chemistries shown in Table IV in any combination of Sense/Antisense chemistries, such as Stab 7/8, Stab 7/11, Stab 8/8, Stab 18/8, Stab 18/11, Stab 12/13, Stab 7/13, Stab 18/13, Stab 7/19, Stab 8/19, Stab 18/19, Stab 7/20, Stab 8/20, Stab 18/20, Stab 7/32, Stab 8/32, or Stab 18/32 (e.g., any siNA having Stab 7, 8, 11, 12, 13, 14, 15, 17, 18, 19, 20, or 32 sense or antisense strands or any combination thereof).

[0058] In one embodiment, the invention features a chemically synthesized double stranded RNA molecule that directs cleavage of a MAP kinase RNA via RNA interference, wherein each strand of said RNA molecule is about 15 to about 30 nucleotides in length; one strand of the RNA molecule comprises nucleotide sequence having sufficient complementarity to the MAP kinase RNA for the RNA molecule to direct cleavage of the MAP kinase RNA via RNA interference; and wherein at least one strand of the RNA molecule optionally comprises one or more chemically modified nucleotides described herein, such as without limitation deoxynucleotides, 2′-O-methyl nucleotides, 2′-deoxy-2′-fluoro nucleotides, 2′-O-methoxyethyl nucleotides etc.

[0059] In one embodiment, the invention features a medicament comprising a siNA molecule of the invention.

[0060] In one embodiment, the invention features an active ingredient comprising a siNA molecule of the invention.

[0061] In one embodiment, the invention features the use of a double-stranded short interfering nucleic acid (siNA) molecule to inhibit, down-regulate, or reduce expression of a MAP kinase gene, wherein the siNA molecule comprises one or more chemical modifications and each strand of the double-stranded siNA is independently about 15 to about 30 or more (e.g., about 15, 16, 17, 18, 19, 20, 21, 22, 23, 24, 25, 26, 27, 28, 29 or 30 or more) nucleotides long. In one embodiment, the siNA molecule of the invention is a double stranded nucleic acid molecule comprising one or more chemical modifications, where each of the two fragments of the siNA molecule independently comprise about 15 to about 40 (e.g. about 15, 16, 17, 18, 19, 20, 21, 22, 23, 24, 25, 26, 27, 28, 29, 30, 31, 23, 33, 34, 35, 36, 37, 38, 39, or 40) nucleotides and where one of the strands comprises at least 15 nucleotides that are complementary to nucleotide sequence of MAP kinase encoding RNA or a portion thereof. In a non-limiting example, each of the two fragments of the siNA molecule comprise about 21 nucleotides. In another embodiment, the siNA molecule is a double stranded nucleic acid molecule comprising one or more chemical modifications, where each strand is about 21 nucleotide long and where about 19 nucleotides of each fragment of the siNA molecule are base-paired to the complementary nucleotides of the other fragment of the siNA molecule, wherein at least two 3′ terminal nucleotides of each fragment of the siNA molecule are not base-paired to the nucleotides of the other fragment of the siNA molecule. In another embodiment, the siNA molecule is a double stranded nucleic acid molecule comprising one or more chemical modifications, where each strand is about 19 nucleotide long and where the nucleotides of each fragment of the siNA molecule are base-paired to the complementary nucleotides of the other fragment of the siNA molecule to form at least about 15 (e.g., 15, 16, 17, 18, or 19) base pairs, wherein one or both ends of the siNA molecule are blunt ends. In one embodiment, each of the two 3′ terminal nucleotides of each fragment of the siNA molecule is a 2′-deoxy-pyrimidine nucleotide, such as a 2′-deoxy-thymidine. In another embodiment, all nucleotides of each fragment of the siNA molecule are base-paired to the complementary nucleotides of the other fragment of the siNA molecule. In another embodiment, the siNA molecule is a double stranded nucleic acid molecule of about 19 to about 25 base pairs having a sense region and an antisense region and comprising one or more chemical modifications, where about 19 nucleotides of the antisense region are base-paired to the nucleotide sequence or a portion thereof of the RNA encoded by the MAP kinase gene. In another embodiment, about 21 nucleotides of the antisense region are base-paired to the nucleotide sequence or a portion thereof of the RNA encoded by the MAP kinase gene. In any of the above embodiments, the 5′-end of the fragment comprising said antisense region can optionally include a phosphate group.

[0062] In one embodiment, the invention features the use of a double-stranded short interfering nucleic acid (siNA) molecule that inhibits, down-regulates, or reduces expression of a MAP kinase gene, wherein one of the strands of the double-stranded siNA molecule is an antisense strand which comprises nucleotide sequence that is complementary to nucleotide sequence of MAP kinase RNA or a portion thereof, the other strand is a sense strand which comprises nucleotide sequence that is complementary to a nucleotide sequence of the antisense strand and wherein a majority of the pyrimidine nucleotides present in the double-stranded siNA molecule comprises a sugar modification.

[0063] In one embodiment, the invention features a double-stranded short interfering nucleic acid (siNA) molecule that inhibits, down-regulates, or reduces expression of a MAP kinase gene, wherein one of the strands of the double-stranded siNA molecule is an antisense strand which comprises nucleotide sequence that is complementary to nucleotide sequence of MAP kinase RNA or a portion thereof, wherein the other strand is a sense strand which comprises nucleotide sequence that is complementary to a nucleotide sequence of the antisense strand and wherein a majority of the pyrimidine nucleotides present in the double-stranded siNA molecule comprises a sugar modification.

[0064] In one embodiment, the invention features a double-stranded short interfering nucleic acid (siNA) molecule that inhibits, down-regulates, or reduces expression of a MAP kinase gene, wherein one of the strands of the double-stranded siNA molecule is an antisense strand which comprises nucleotide sequence that is complementary to nucleotide sequence of MAP kinase RNA that encodes a protein or portion thereof, the other strand is a sense strand which comprises nucleotide sequence that is complementary to a nucleotide sequence of the antisense strand and wherein a majority of the pyrimidine nucleotides present in the double-stranded siNA molecule comprises a sugar modification. In one embodiment, each strand of the siNA molecule comprises about 15 to about 30 or more (e.g., about 15, 16, 17, 18, 19, 20, 21, 22, 23, 24, 25, 26, 27, 28, 29, or 30 or more) nucleotides, wherein each strand comprises at least about 15 nucleotides that are complementary to the nucleotides of the other strand. In one embodiment, the siNA molecule is assembled from two oligonucleotide fragments, wherein one fragment comprises the nucleotide sequence of the antisense strand of the siNA molecule and a second fragment comprises nucleotide sequence of the sense region of the siNA molecule. In one embodiment, the sense strand is connected to the antisense strand via a linker molecule, such as a polynucleotide linker or a non-nucleotide linker. In a further embodiment, the pyrimidine nucleotides present in the sense strand are 2′-deoxy-2′-fluoro pyrimidine nucleotides and the purine nucleotides present in the sense region are 2′-deoxy purine nucleotides. In another embodiment, the pyrimidine nucleotides present in the sense strand are 2′-deoxy-2′-fluoro pyrimidine nucleotides and the purine nucleotides present in the sense region are 2′-O-methyl purine nucleotides. In still another embodiment, the pyrimidine nucleotides present in the antisense strand are 2′-deoxy-2′-fluoro pyrimidine nucleotides and any purine nucleotides present in the antisense strand are 2′-deoxy purine nucleotides. In another embodiment, the antisense strand comprises one or more 2′-deoxy-2′-fluoro pyrimidine nucleotides and one or more 2′-O-methyl purine nucleotides. In another embodiment, the pyrimidine nucleotides present in the antisense strand are 2′-deoxy-2′-fluoro pyrimidine nucleotides and any purine nucleotides present in the antisense strand are 2′-O-methyl purine nucleotides. In a further embodiment the sense strand comprises a 3′-end and a 5′-end, wherein a terminal cap moiety (e.g., an inverted deoxy abasic moiety or inverted deoxy nucleotide moiety such as inverted thymidine) is present at the 5′-end, the 3′-end, or both of the 5′ and 3′ ends of the sense strand. In another embodiment, the antisense strand comprises a phosphorothioate internucleotide linkage at the 3′ end of the antisense strand. In another embodiment, the antisense strand comprises a glyceryl modification at the 3′ end. In another embodiment, the 5′-end of the antisense strand optionally includes a phosphate group.

[0065] In any of the above-described embodiments of a double-stranded short interfering nucleic acid (siNA) molecule that inhibits expression of a MAP kinase gene, wherein a majority of the pyrimidine nucleotides present in the double-stranded siNA molecule comprises a sugar modification, each of the two strands of the siNA molecule can comprise about 15 to about 30 or more (e.g., about 15, 16, 17, 18, 19, 20, 21, 22, 23, 24, 25, 26, 27, 28, 29, or 30 or more) nucleotides. In one embodiment, about 15 to about 30 or more (e.g., about 15, 16, 17, 18, 19, 20, 21, 22, 23, 24, 25, 26, 27, 28, 29, or 30 or more) nucleotides of each strand of the siNA molecule are base-paired to the complementary nucleotides of the other strand of the siNA molecule. In another embodiment, about 15 to about 30 or more (e.g., about 15, 16, 17, 18, 19, 20, 21, 22, 23, 24, 25, 26, 27, 28, 29, or 30 or more) nucleotides of each strand of the siNA molecule are base-paired to the complementary nucleotides of the other strand of the siNA molecule, wherein at least two 3′ terminal nucleotides of each strand of the siNA molecule are not base-paired to the nucleotides of the other strand of the siNA molecule. In another embodiment, each of the two 3′ terminal nucleotides of each fragment of the siNA molecule is a 2′-deoxy-pyrimidine, such as 2′-deoxy-thymidine. In one embodiment, each strand of the siNA molecule is base-paired to the complementary nucleotides of the other strand of the siNA molecule. In one embodiment, about 15 to about 30 (e.g., about 15, 16, 17, 18, 19, 20, 21, 22, 23, 24, 25, 26, 27, 28, 29, or 30) nucleotides of the antisense strand are base-paired to the nucleotide sequence of the MAP kinase RNA or a portion thereof. In one embodiment, about 18 to about 25 (e.g., about 18, 19, 20, 21, 22, 23, 24, or 25) nucleotides of the antisense strand are base-paired to the nucleotide sequence of the MAP kinase RNA or a portion thereof.

[0066] In one embodiment, the invention features a double-stranded short interfering nucleic acid (siNA) molecule that inhibits expression of a MAP kinase gene, wherein one of the strands of the double-stranded siNA molecule is an antisense strand which comprises nucleotide sequence that is complementary to nucleotide sequence of MAP kinase RNA or a portion thereof, the other strand is a sense strand which comprises nucleotide sequence that is complementary to a nucleotide sequence of the antisense strand and wherein a majority of the pyrimidine nucleotides present in the double-stranded siNA molecule comprises a sugar modification, and wherein the 5′-end of the antisense strand optionally includes a phosphate group.

[0067] In one embodiment, the invention features a double-stranded short interfering nucleic acid (siNA) molecule that inhibits expression of a MAP kinase gene, wherein one of the strands of the double-stranded siNA molecule is an antisense strand which comprises nucleotide sequence that is complementary to nucleotide sequence of MAP kinase RNA or a portion thereof, the other strand is a sense strand which comprises nucleotide sequence that is complementary to a nucleotide sequence of the antisense strand and wherein a majority of the pyrimidine nucleotides present in the double-stranded siNA molecule comprises a sugar modification, and wherein the nucleotide sequence or a portion thereof of the antisense strand is complementary to a nucleotide sequence of the untranslated region or a portion thereof of the MAP kinase RNA.

[0068] In one embodiment, the invention features a double-stranded short interfering nucleic acid (siNA) molecule that inhibits expression of a MAP kinase gene, wherein one of the strands of the double-stranded siNA molecule is an antisense strand which comprises nucleotide sequence that is complementary to nucleotide sequence of MAP kinase RNA or a portion thereof, wherein the other strand is a sense strand which comprises nucleotide sequence that is complementary to a nucleotide sequence of the antisense strand, wherein a majority of the pyrimidine nucleotides present in the double-stranded siNA molecule comprises a sugar modification, and wherein the nucleotide sequence of the antisense strand is complementary to a nucleotide sequence of the MAP kinase RNA or a portion thereof that is present in the MAP kinase RNA.

[0069] In one embodiment, the invention features a composition comprising a siNA molecule of the invention in a pharmaceutically acceptable carrier or diluent.

[0070] In a non-limiting example, the introduction of chemically-modified nucleotides into nucleic acid molecules provides a powerful tool in overcoming potential limitations of in vivo stability and bioavailability inherent to native RNA molecules that are delivered exogenously. For example, the use of chemically-modified nucleic acid molecules can enable a lower dose of a particular nucleic acid molecule for a given therapeutic effect since chemically-modified nucleic acid molecules tend to have a longer half-life in serum. Furthermore, certain chemical modifications can improve the bioavailability of nucleic acid molecules by targeting particular cells or tissues and/or improving cellular uptake of the nucleic acid molecule. Therefore, even if the activity of a chemically-modified nucleic acid molecule is reduced as compared to a native nucleic acid molecule, for example, when compared to an all-RNA nucleic acid molecule, the overall activity of the modified nucleic acid molecule can be greater than that of the native molecule due to improved stability and/or delivery of the molecule. Unlike native unmodified siNA, chemically-modified siNA can also minimize the possibility of activating interferon activity in humans.

[0071] In any of the embodiments of siNA molecules described herein, the antisense region of a siNA molecule of the invention can comprise a phosphorothioate internucleotide linkage at the 3′-end of said antisense region. In any of the embodiments of siNA molecules described herein, the antisense region can comprise about one to about five phosphorothioate internucleotide linkages at the 5′-end of said antisense region. In any of the embodiments of siNA molecules described herein, the 3′-terminal nucleotide overhangs of a siNA molecule of the invention can comprise ribonucleotides or deoxyribonucleotides that are chemically-modified at a nucleic acid sugar, base, or backbone. In any of the embodiments of siNA molecules described herein, the 3′-terminal nucleotide overhangs can comprise one or more universal base ribonucleotides. In any of the embodiments of siNA molecules described herein, the 3′-terminal nucleotide overhangs can comprise one or more acyclic nucleotides.

[0072] One embodiment of the invention provides an expression vector comprising a nucleic acid sequence encoding at least one siNA molecule of the invention in a manner that allows expression of the nucleic acid molecule. Another embodiment of the invention provides a mammalian cell comprising such an expression vector. The mammalian cell can be a human cell. The siNA molecule of the expression vector can comprise a sense region and an antisense region. The antisense region can comprise sequence complementary to a RNA or DNA sequence encoding MAP kinase and the sense region can comprise sequence complementary to the antisense region. The siNA molecule can comprise two distinct strands having complementary sense and antisense regions. The siNA molecule can comprise a single strand having complementary sense and antisense regions.

[0073] In one embodiment, the invention features a chemically-modified short interfering nucleic acid (siNA) molecule capable of mediating RNA interference (RNAi) against MAP kinase inside a cell or reconstituted in vitro system, wherein the chemical modification comprises one or more (e.g., about 1, 2, 3, 4, 5, 6, 7, 8, 9, 10, or more) nucleotides comprising a backbone modified internucleotide linkage having Formula I: [chemical structure]
[0074] wherein each R1 and R2 is independently any nucleotide, non-nucleotide, or polynucleotide which can be naturally-occurring or chemically-modified, each X and Y is independently O, S, N, alkyl, or substituted alkyl, each Z and W is independently O, S, N, alkyl, substituted alkyl, O-alkyl, S-alkyl, alkaryl, aralkyl, or acetyl and wherein W, X, Y, and Z are optionally not all O. In another embodiment, a backbone modification of the invention comprises a phosphonoacetate and/or thiophosphonoacetate internucleotide linkage (see for example Sheehan et al., 2003, Nucleic Acids Research, 31, 4109-4118).

[0075] The chemically-modified internucleotide linkages having Formula I, for example, wherein any Z, W, X, and/or Y independently comprises a sulphur atom, can be present in one or both oligonucleotide strands of the siNA duplex, for example, in the sense strand, the antisense strand, or both strands. The siNA molecules of the invention can comprise one or more (e.g., about 1, 2, 3, 4, 5, 6, 7, 8, 9, 10, or more) chemically-modified internucleotide linkages having Formula I at the 3′-end, the 5′-end, or both of the 3′ and 5′-ends of the sense strand, the antisense strand, or both strands. For example, an exemplary siNA molecule of the invention can comprise about 1 to about 5 or more (e.g., about 1, 2, 3, 4, 5, or more) chemically-modified internucleotide linkages having Formula I at the 5′-end of the sense strand, the antisense strand, or both strands. In another non-limiting example, an exemplary siNA molecule of the invention can comprise one or more (e.g., about 1, 2, 3, 4, 5, 6, 7, 8, 9, 10, or more) pyrimidine nucleotides with chemically-modified internucleotide linkages having Formula I in the sense strand, the antisense strand, or both strands. In yet another non-limiting example, an exemplary siNA molecule of the invention can comprise one or more (e.g., about 1, 2, 3, 4, 5, 6, 7, 8, 9, 10, or more) purine nucleotides with chemically-modified internucleotide linkages having Formula I in the sense strand, the antisense strand, or both strands. In another embodiment, a siNA molecule of the invention having internucleotide linkage(s) of Formula I also comprises a chemically-modified nucleotide or non-nucleotide having any of Formulae I-VII.

[0076] In one embodiment, the invention features a chemically-modified short interfering nucleic acid (siNA) molecule capable of mediating RNA interference (RNAi) against MAP kinase inside a cell or reconstituted in vitro system, wherein the chemical modification comprises one or more (e.g., about 1, 2, 3, 4, 5, 6, 7, 8, 9, 10, or more) nucleotides or non-nucleotides having Formula II: [chemical structure]
wherein each R3, R4, R5, R6, R7, R8, R10, R11 and R12 is independently H, OH, alkyl, substituted alkyl, alkaryl or aralkyl, F, Cl, Br, CN, CF3, OCF3, OCN, O-alkyl, S-alkyl, N-alkyl, O-alkenyl, S-alkenyl, N-alkenyl, SO-alkyl, alkyl-OSH, alkyl-OH, O-alkyl-OH, O-alkyl-SH, S-alkyl-OH, S-alkyl-SH, alkyl-S-alkyl, alkyl-O-alkyl, ONO2, NO2, N3, NH2, aminoalkyl, aminoacid, aminoacyl, ONH2, O-aminoalkyl, O-aminoacid, O-aminoacyl, heterocycloalkyl, heterocycloalkaryl, aminoalkylamino, polyalklylamino, substituted silyl, or group having Formula I or II; R9 is O, S, CH2, S═O, CHF, or CF2, and B is a nucleosidic base such as adenine, guanine, uracil, cytosine, thymine, 2-aminoadenosine, 5-methylcytosine, 2,6-diaminopurine, or any other non-naturally occurring base that can be complementary or non-complementary to target RNA or a non-nucleosidic base such as phenyl, naphthyl, 3-nitropyrrole, 5-nitroindole, nebularine, pyridone, pyridinone, or any other non-naturally occurring universal base that can be complementary or non-complementary to target RNA.

[0077] The chemically-modified nucleotide or non-nucleotide of Formula II can be present in one or both oligonucleotide strands of the siNA duplex, for example in the sense strand, the antisense strand, or both strands. The siNA molecules of the invention can comprise one or more chemically-modified nucleotides or non-nucleotides of Formula II at the 3′-end, the 5′-end, or both of the 3′ and 5′-ends of the sense strand, the antisense strand, or both strands. For example, an exemplary siNA molecule of the invention can comprise about 1 to about 5 or more (e.g., about 1, 2, 3, 4, 5, or more) chemically-modified nucleotides or non-nucleotides of Formula II at the 5′-end of the sense strand, the antisense strand, or both strands. In anther non-limiting example, an exemplary siNA molecule of the invention can comprise about 1 to about 5 or more (e.g., about 1, 2, 3, 4, 5, or more) chemically-modified nucleotides or non-nucleotides of Formula II at the 3′-end of the sense strand, the antisense strand, or both strands.

[0078] In one embodiment, the invention features a chemically-modified short interfering nucleic acid (siNA) molecule capable of mediating RNA interference (RNAi) against MAP kinase inside a cell or reconstituted in vitro system, wherein the chemical modification comprises one or more (e.g., about 1, 2, 3, 4, 5, 6, 7, 8, 9, 10, or more) nucleotides or non-nucleotides having Formula III: [chemical structure]
wherein each R3, R4, R5, R6, R7, R8, R10, R11 and R12 is independently H, OH, alkyl, substituted alkyl, alkaryl or aralkyl, F, Cl, Br, CN, CF3, OCF3, OCN, O-alkyl, S-alkyl, N-alkyl, O-alkenyl, S-alkenyl, N-alkenyl, SO-alkyl, alkyl-OSH, alkyl-OH, O-alkyl-OH, O-alkyl-SH, S-alkyl-OH, S-alkyl-SH, alkyl-S-alkyl, alkyl-O-alkyl, ONO2, NO2, N3, NH2, aminoalkyl, aminoacid, aminoacyl, ONH2, O-aminoalkyl, O-aminoacid, O-aminoacyl, heterocycloalkyl, heterocycloalkaryl, aminoalkylamino, polyalklylamino, substituted silyl, or group having Formula I or II; R9 is O, S, CH2, S═O, CHF, or CF2, and B is a nucleosidic base such as adenine, guanine, uracil, cytosine, thymine, 2-aminoadenosine, 5-methylcytosine, 2,6-diaminopurine, or any other non-naturally occurring base that can be employed to be complementary or non-complementary to target RNA or a non-nucleosidic base such as phenyl, naphthyl, 3-nitropyrrole, 5-nitroindole, nebularine, pyridone, pyridinone, or any other non-naturally occurring universal base that can be complementary or non-complementary to target RNA.

[0079] The chemically-modified nucleotide or non-nucleotide of Formula III can be present in one or both oligonucleotide strands of the siNA duplex, for example, in the sense strand, the antisense strand, or both strands. The siNA molecules of the invention can comprise one or more chemically-modified nucleotides or non-nucleotides of Formula III at the 3′-end, the 5′-end, or both of the 3′ and 5′-ends of the sense strand, the antisense strand, or both strands. For example, an exemplary siNA molecule of the invention can comprise about 1 to about 5 or more (e.g., about 1, 2, 3, 4, 5, or more) chemically-modified nucleotide(s) or non-nucleotide(s) of Formula III at the 5′-end of the sense strand, the antisense strand, or both strands. In anther non-limiting example, an exemplary siNA molecule of the invention can comprise about 1 to about 5 or more (e.g., about 1, 2, 3, 4, 5, or more) chemically-modified nucleotide or non-nucleotide of Formula III at the 3′-end of the sense strand, the antisense strand, or both strands.

[0080] In another embodiment, a siNA molecule of the invention comprises a nucleotide having Formula II or III, wherein the nucleotide having Formula II or III is in an inverted configuration. For example, the nucleotide having Formula II or III is connected to the siNA construct in a 3′-3′,3′-2′,2′-3′, or 5′-5′ configuration, such as at the 3′-end, the 5′-end, or both of the 3′ and 5′-ends of one or both siNA strands.

[0081] In one embodiment, the invention features a chemically-modified short interfering nucleic acid (siNA) molecule capable of mediating RNA interference (RNAi) against MAP kinase inside a cell or reconstituted in vitro system, wherein the chemical modification comprises a 5′-terminal phosphate group having Formula IV: [chemical structure]
wherein each X and Y is independently O, S, N, alkyl, substituted alkyl, or alkylhalo; wherein each Z and W is independently O, S, N, alkyl, substituted alkyl, O-alkyl, S-alkyl, alkaryl, aralkyl, alkylhalo, or acetyl; and wherein W, X, Y and Z are not all O.

[0082] In one embodiment, the invention features a siNA molecule having a 5′-terminal phosphate group having Formula IV on the target-complementary strand, for example, a strand complementary to a target RNA, wherein the siNA molecule comprises an all RNA siNA molecule. In another embodiment, the invention features a siNA molecule having a 5′-terminal phosphate group having Formula IV on the target-complementary strand wherein the siNA molecule also comprises about 1 to about 3 (e.g., about 1, 2, or 3) nucleotide 3′-terminal nucleotide overhangs having about 1 to about 4 (e.g., about 1, 2, 3, or 4) deoxyribonucleotides on the 3′-end of one or both strands. In another embodiment, a 5′-terminal phosphate group having Formula IV is present on the target-complementary strand of a siNA molecule of the invention, for example a siNA molecule having chemical modifications having any of Formulae I-VII.

[0083] In one embodiment, the invention features a chemically-modified short interfering nucleic acid (siNA) molecule capable of mediating RNA interference (RNAi) against MAP kinase inside a cell or reconstituted in vitro system, wherein the chemical modification comprises one or more phosphorothioate internucleotide linkages. For example, in a non-limiting example, the invention features a chemically-modified short interfering nucleic acid (siNA) having about 1, 2, 3, 4, 5, 6, 7, 8 or more phosphorothioate internucleotide linkages in one siNA strand. In yet another embodiment, the invention features a chemically-modified short interfering nucleic acid (siNA) individually having about 1, 2, 3, 4, 5, 6, 7, 8 or more phosphorothioate internucleotide linkages in both siNA strands. The phosphorothioate internucleotide linkages can be present in one or both oligonucleotide strands of the siNA duplex, for example in the sense strand, the antisense strand, or both strands. The siNA molecules of the invention can comprise one or more phosphorothioate internucleotide linkages at the 3′-end, the 5′-end, or both of the 3′- and 5′-ends of the sense strand, the antisense strand, or both strands. For example, an exemplary siNA molecule of the invention can comprise about 1 to about 5 or more (e.g., about 1, 2, 3, 4, 5, or more) consecutive phosphorothioate internucleotide linkages at the 5′-end of the sense strand, the antisense strand, or both strands. In another non-limiting example, an exemplary siNA molecule of the invention can comprise one or more (e.g., about 1, 2, 3, 4, 5, 6, 7, 8, 9, 10, or more) pyrimidine phosphorothioate internucleotide linkages in the sense strand, the antisense strand, or both strands. In yet another non-limiting example, an exemplary siNA molecule of the invention can comprise one or more (e.g., about 1, 2, 3, 4, 5, 6, 7, 8, 9, 10, or more) purine phosphorothioate internucleotide linkages in the sense strand, the antisense strand, or both strands.

[0084] In one embodiment, the invention features a siNA molecule, wherein the sense strand comprises one or more, for example, about 1, 2, 3, 4, 5, 6, 7, 8, 9, 10, or more phosphorothioate internucleotide linkages, and/or one or more (e.g., about 1, 2, 3, 4, 5, 6, 7, 8, 9, 10 or more) 2′-deoxy, 2′-O-methyl, 2′-deoxy-2′-fluoro, and/or about one or more (e.g., about 1, 2, 3, 4, 5, 6, 7, 8, 9, 10 or more) universal base modified nucleotides, and optionally a terminal cap molecule at the 3′-end, the 5′-end, or both of the 3′- and 5′-ends of the sense strand; and wherein the antisense strand comprises about 1 to about 10 or more, specifically about 1, 2, 3, 4, 5, 6, 7, 8, 9, 10, or more phosphorothioate internucleotide linkages, and/or one or more (e.g., about 1, 2, 3, 4, 5, 6, 7, 8, 9, 10 or more) 2′-deoxy, 2′-O-methyl, 2′-deoxy-2′-fluoro, and/or one or more (e.g., about 1, 2, 3, 4, 5, 6, 7, 8, 9, 10 or more) universal base modified nucleotides, and optionally a terminal cap molecule at the 3′-end, the 5′-end, or both of the 3′- and 5′-ends of the antisense strand. In another embodiment, one or more, for example about 1, 2, 3, 4, 5, 6, 7, 8, 9, 10, or more, pyrimidine nucleotides of the sense and/or antisense siNA strand are chemically-modified with 2′-deoxy, 2′-O-methyl and/or 2′-deoxy-2′-fluoro nucleotides, with or without one or more, for example about 1, 2, 3, 4, 5, 6, 7, 8, 9, 10, or more, phosphorothioate internucleotide linkages and/or a terminal cap molecule at the 3′-end, the 5′-end, or both of the 3′- and 5′-ends, being present in the same or different strand.

[0085] In another embodiment, the invention features a siNA molecule, wherein the sense strand comprises about 1 to about 5, specifically about 1, 2, 3, 4, or 5 phosphorothioate internucleotide linkages, and/or one or more (e.g., about 1, 2, 3, 4, 5, or more) 2′-deoxy, 2′-O-methyl, 2′-deoxy-2′-fluoro, and/or one or more (e.g., about 1, 2, 3, 4, 5, or more) universal base modified nucleotides, and optionally a terminal cap molecule at the 3-end, the 5′-end, or both of the 3′- and 5′-ends of the sense strand; and wherein the antisense strand comprises about 1 to about 5 or more, specifically about 1, 2, 3, 4, 5, or more phosphorothioate internucleotide linkages, and/or one or more (e.g., about 1, 2, 3, 4, 5, 6, 7, 8, 9, 10 or more) 2′-deoxy, 2′-O-methyl, 2′-deoxy-2′-fluoro, and/or one or more (e.g., about 1, 2, 3, 4, 5, 6, 7, 8, 9, 10 or more) universal base modified nucleotides, and optionally a terminal cap molecule at the 3′-end, the 5′-end, or both of the 3′- and 5′-ends of the antisense strand. In another embodiment, one or more, for example about 1, 2, 3, 4, 5, 6, 7, 8, 9, 10, or more, pyrimidine nucleotides of the sense and/or antisense siNA strand are chemically-modified with 2′-deoxy, 2′-O-methyl and/or 2′-deoxy-2′-fluoro nucleotides, with or without about 1 to about 5 or more, for example about 1, 2, 3, 4, 5, or more phosphorothioate internucleotide linkages and/or a terminal cap molecule at the 3′-end, the 5′-end, or both of the 3′- and 5′-ends, being present in the same or different strand.

[0086] In one embodiment, the invention features a siNA molecule, wherein the antisense strand comprises one or more, for example, about 1, 2, 3, 4, 5, 6, 7, 8, 9, 10, or more phosphorothioate internucleotide linkages, and/or about one or more (e.g., about 1, 2, 3, 4, 5, 6, 7, 8, 9, 10 or more) 2′-deoxy, 2′-O-methyl, 2′-deoxy-2′-fluoro, and/or one or more (e.g., about 1, 2, 3, 4, 5, 6, 7, 8, 9, 10 or more) universal base modified nucleotides, and optionally a terminal cap molecule at the 3′-end, the 5′-end, or both of the 3′- and 5′-ends of the sense strand; and wherein the antisense strand comprises about 1 to about 10 or more, specifically about 1, 2, 3, 4, 5, 6, 7, 8, 9, 10 or more phosphorothioate internucleotide linkages, and/or one or more (e.g., about 1, 2, 3, 4, 5, 6, 7, 8, 9, 10 or more) 2′-deoxy, 2′-O-methyl, 2′-deoxy-2′-fluoro, and/or one or more (e.g., about 1, 2, 3, 4, 5, 6, 7, 8, 9, 10 or more) universal base modified nucleotides, and optionally a terminal cap molecule at the 3′-end, the 5′-end, or both of the 3′- and 5′-ends of the antisense strand. In another embodiment, one or more, for example about 1, 2, 3, 4, 5, 6, 7, 8, 9, 10 or more pyrimidine nucleotides of the sense and/or antisense siNA strand are chemically-modified with 2′-deoxy, 2′-O-methyl and/or 2′-deoxy-2′-fluoro nucleotides, with or without one or more, for example, about 1, 2, 3, 4, 5, 6, 7, 8, 9, 10 or more phosphorothioate internucleotide linkages and/or a terminal cap molecule at the 3′-end, the 5′-end, or both of the 3′ and 5′-ends, being present in the same or different strand.

[0087] In another embodiment, the invention features a siNA molecule, wherein the antisense strand comprises about 1 to about 5 or more, specifically about 1, 2, 3, 4, 5 or more phosphorothioate internucleotide linkages, and/or one or more (e.g., about 1, 2, 3, 4, 5, 6, 7, 8, 9, 10 or more) 2′-deoxy, 2′-O-methyl, 2′-deoxy-2′-fluoro, and/or one or more (e.g., about 1, 2, 3, 4, 5, 6, 7, 8, 9, 10 or more) universal base modified nucleotides, and optionally a terminal cap molecule at the 3′-end, the 5′-end, or both of the 3′- and 5′-ends of the sense strand; and wherein the antisense strand comprises about 1 to about 5 or more, specifically about 1, 2, 3, 4, 5 or more phosphorothioate internucleotide linkages, and/or one or more (e.g., about 1, 2, 3, 4, 5, 6, 7, 8, 9, 10 or more) 2′-deoxy, 2′-O-methyl, 2′-deoxy-2′-fluoro, and/or one or more (e.g., about 1, 2, 3, 4, 5, 6, 7, 8, 9, 10 or more) universal base modified nucleotides, and optionally a terminal cap molecule at the 3′-end, the 5′-end, or both of the 3′- and 5′-ends of the antisense strand. In another embodiment, one or more, for example about 1, 2, 3, 4, 5, 6, 7, 8, 9, 10 or more pyrimidine nucleotides of the sense and/or antisense siNA strand are chemically-modified with 2′-deoxy, 2′-O-methyl and/or 2′-deoxy-2′-fluoro nucleotides, with or without about 1 to about 5, for example about 1, 2, 3, 4, 5 or more phosphorothioate internucleotide linkages and/or a terminal cap molecule at the 3′-end, the 5′-end, or both of the 3′- and 5′-ends, being present in the same or different strand.

[0088] In one embodiment, the invention features a chemically-modified short interfering nucleic acid (siNA) molecule having about 1 to about 5 or more (specifically about 1, 2, 3, 4, 5 or more) phosphorothioate internucleotide linkages in each strand of the siNA molecule.

[0089] In another embodiment, the invention features a siNA molecule comprising 2′-5′ internucleotide linkages. The 2′-5′ internucleotide linkage(s) can be at the 3′-end, the 5′-end, or both of the 3′- and 5′-ends of one or both siNA sequence strands. In addition, the 2′-5′ internucleotide linkage(s) can be present at various other positions within one or both siNA sequence strands, for example, about 1, 2, 3, 4, 5, 6, 7, 8, 9, 10, or more including every internucleotide linkage of a pyrimidine nucleotide in one or both strands of the siNA molecule can comprise a 2′-5′ internucleotide linkage, or about 1, 2, 3, 4, 5, 6, 7, 8, 9, 10, or more including every internucleotide linkage of a purine nucleotide in one or both strands of the siNA molecule can comprise a 2′-5′ internucleotide linkage.

[0090] In another embodiment, a chemically-modified siNA molecule of the invention comprises a duplex having two strands, one or both of which can be chemically-modified, wherein each strand is independently about 15 to about 30 (e.g., about 15, 16, 17, 18, 19, 20, 21, 22, 23, 24, 25, 26, 27, 28, 29, or 30) nucleotides in length, wherein the duplex has about 15 to about 30 (e.g., about 15, 16, 17, 18, 19, 20, 21, 22, 23, 24, 25, 26, 27, 28, 29, or 30) base pairs, and wherein the chemical modification comprises a structure having any of Formulae I-VII. For example, an exemplary chemically-modified siNA molecule of the invention comprises a duplex having two strands, one or both of which can be chemically-modified with a chemical modification having any of Formulae I-VII or any combination thereof, wherein each strand consists of about 21 nucleotides, each having a 2-nucleotide 3′-terminal nucleotide overhang, and wherein the duplex has about 19 base pairs. In another embodiment, a siNA molecule of the invention comprises a single stranded hairpin structure, wherein the siNA is about 36 to about 70 (e.g., about 36, 40, 45, 50, 55, 60, 65, or 70) nucleotides in length having about 15 to about 30 (e.g., about 15, 16, 17, 18, 19, 20, 21, 22, 23, 24, 25, 26, 27, 28, 29, or 30) base pairs, and wherein the siNA can include a chemical modification comprising a structure having any of Formulae I-VII or any combination thereof. For example, an exemplary chemically-modified siNA molecule of the invention comprises a linear oligonucleotide having about 42 to about 50 (e.g., about 42, 43, 44, 45, 46, 47, 48, 49, or 50) nucleotides that is chemically-modified with a chemical modification having any of Formulae I-VII or any combination thereof, wherein the linear oligonucleotide forms a hairpin structure having about 19 to about 21 (e.g., 19, 20, or 21) base pairs and a 2-nucleotide 3′-terminal nucleotide overhang. In another embodiment, a linear hairpin siNA molecule of the invention contains a stem loop motif, wherein the loop portion of the siNA molecule is biodegradable. For example, a linear hairpin siNA molecule of the invention is designed such that degradation of the loop portion of the siNA molecule in vivo can generate a double-stranded siNA molecule with 3′-terminal overhangs, such as 3′-terminal nucleotide overhangs comprising about 2 nucleotides.

[0091] In another embodiment, a siNA molecule of the invention comprises a hairpin structure, wherein the siNA is about 25 to about 50 (e.g., about 25, 26, 27, 28, 29, 30, 31, 32, 33, 34, 35, 36, 37, 38, 39, 40, 41, 42, 43, 44, 45, 46, 47, 48, 49, or 50) nucleotides in length having about 3 to about 25 (e.g., about 3, 4, 5, 6, 7, 8, 9, 10, 11, 12, 13, 14, 15, 16, 17, 18, 19, 20, 21, 22, 23, 24, or 25) base pairs, and wherein the siNA can include one or more chemical modifications comprising a structure having any of Formulae I-VII or any combination thereof. For example, an exemplary chemically-modified siNA molecule of the invention comprises a linear oligonucleotide having about 25 to about 35 (e.g., about 25, 26, 27, 28, 29, 30, 31, 32, 33, 34, or 35) nucleotides that is chemically-modified with one or more chemical modifications having any of Formulae I-VII or any combination thereof, wherein the linear oligonucleotide forms a hairpin structure having about 3 to about 25 (e.g., about 3, 4, 5, 6, 7, 8, 9, 10, 11, 12, 13, 14, 15, 16, 17, 18, 19, 20, 21, 22, 23, 24, or 25) base pairs and a 5′-terminal phosphate group that can be chemically modified as described herein (for example a 5′-terminal phosphate group having Formula IV). In another embodiment, a linear hairpin siNA molecule of the invention contains a stem loop motif, wherein the loop portion of the siNA molecule is biodegradable. In one embodiment, a linear hairpin siNA molecule of the invention comprises a loop portion comprising a non-nucleotide linker.

[0092] In another embodiment, a siNA molecule of the invention comprises an asymmetric hairpin structure, wherein the siNA is about 25 to about 50 (e.g., about 25, 26, 27, 28, 29, 30, 31, 32, 33, 34, 35, 36, 37, 38, 39, 40, 41, 42, 43, 44, 45, 46, 47, 48, 49, or 50) nucleotides in length having about 3 to about 25 (e.g., about 3, 4, 5, 6, 7, 8, 9, 10, 11, 12, 13, 14, 15, 16, 17, 18, 19, 20, 21, 22, 23, 24, or 25) base pairs, and wherein the siNA can include one or more chemical modifications comprising a structure having any of Formulae I-VII or any combination thereof. For example, an exemplary chemically-modified siNA molecule of the invention comprises a linear oligonucleotide having about 25 to about 35 (e.g., about 25, 26, 27, 28, 29, 30, 31, 32, 33, 34, or 35) nucleotides that is chemically-modified with one or more chemical modifications having any of Formulae I-VII or any combination thereof, wherein the linear oligonucleotide forms an asymmetric hairpin structure having about 3 to about 25 (e.g., about 3, 4, 5, 6, 7, 8, 9, 10, 11, 12, 13, 14, 15, 16, 17, 18, 19, 20, 21, 22, 23, 24, or 25) base pairs and a 5′-terminal phosphate group that can be chemically modified as described herein (for example a 5′-terminal phosphate group having Formula IV). In one embodiment, an asymmetric hairpin siNA molecule of the invention contains a stem loop motif, wherein the loop portion of the siNA molecule is biodegradable. In another embodiment, an asymmetric hairpin siNA molecule of the invention comprises a loop portion comprising a non-nucleotide linker.

[0093] In another embodiment, a siNA molecule of the invention comprises an asymmetric double stranded structure having separate polynucleotide strands comprising sense and antisense regions, wherein the antisense region is about 15 to about 30 (e.g., about 15, 16, 17, 18, 19, 20, 21, 22, 23, 24, 25, 26, 27, 28, 29, or 30) nucleotides in length, wherein the sense region is about 3 to about 25 (e.g., about 3, 4, 5, 6, 7, 8, 9, 10, 11, 12, 13, 14, 15, 16, 17, 18, 19, 20, 21, 22, 23, 24, or 25) nucleotides in length, wherein the sense region and the antisense region have at least 3 complementary nucleotides, and wherein the siNA can include one or more chemical modifications comprising a structure having any of Formulae I-VII or any combination thereof. For example, an exemplary chemically-modified siNA molecule of the invention comprises an asymmetric double stranded structure having separate polynucleotide strands comprising sense and antisense regions, wherein the antisense region is about 18 to about 23 (e.g., about 18, 19, 20, 21, 22, or 23) nucleotides in length and wherein the sense region is about 3 to about 15 (e.g., about 3, 4, 5, 6, 7, 8, 9, 10, 11, 12, 13, 14, or 15) nucleotides in length, wherein the sense region the antisense region have at least 3 complementary nucleotides, and wherein the siNA can include one or more chemical modifications comprising a structure having any of Formulae I-VII or any combination thereof. In another embodiment, the asymmetric double stranded siNA molecule can also have a 5′-terminal phosphate group that can be chemically modified as described herein (for example a 5′-terminal phosphate group having Formula IV).

[0094] In another embodiment, a siNA molecule of the invention comprises a circular nucleic acid molecule, wherein the siNA is about 38 to about 70 (e.g., about 38, 40, 45, 50, 55, 60, 65, or 70) nucleotides in length having about 15 to about 30 (e.g., about 15, 16, 17, 18, 19, 20, 21, 22, 23, 24, 25, 26, 27, 28, 29, or 30) base pairs, and wherein the siNA can include a chemical modification, which comprises a structure having any of Formulae I-VII or any combination thereof. For example, an exemplary chemically-modified siNA molecule of the invention comprises a circular oligonucleotide having about 42 to about 50 (e.g., about 42, 43, 44, 45, 46, 47, 48, 49, or 50) nucleotides that is chemically-modified with a chemical modification having any of Formulae I-VII or any combination thereof, wherein the circular oligonucleotide forms a dumbbell shaped structure having about 19 base pairs and 2 loops.

[0095] In another embodiment, a circular siNA molecule of the invention contains two loop motifs, wherein one or both loop portions of the siNA molecule is biodegradable. For example, a circular siNA molecule of the invention is designed such that degradation of the loop portions of the siNA molecule in vivo can generate a double-stranded siNA molecule with 3′-terminal overhangs, such as 3′-terminal nucleotide overhangs comprising about 2 nucleotides.

[0096] In one embodiment, a siNA molecule of the invention comprises at least one (e.g., about 1, 2, 3, 4, 5, 6, 7, 8, 9, 10, or more) abasic moiety, for example a compound having Formula V: [chemical structure]
wherein each R3, R4, R5, R6, R7, R8, R10, R11, R12, and R13 is independently H, OH, alkyl, substituted alkyl, alkaryl or aralkyl, F, Cl, Br, CN, CF3, OCF3, OCN, O-alkyl, S-alkyl, N-alkyl, O-alkenyl, S-alkenyl, N-alkenyl, SO-alkyl, alkyl-OSH, alkyl-OH, O-alkyl-OH, O-alkyl-SH, S-alkyl-OH, S-alkyl-SH, alkyl-S-alkyl, alkyl-O-alkyl, ONO2, NO2, N3, NH2, aminoalkyl, aminoacid, aminoacyl, ONH2, O-aminoalkyl, O-aminoacid, O-aminoacyl, heterocycloalkyl, heterocycloalkaryl, aminoalkylamino, polyalklylamino, substituted silyl, or group having Formula I or II; R9 is O, S, CH2, S═O, CHF, or CF2.

[0097] In one embodiment, a siNA molecule of the invention comprises at least one (e.g., about 1, 2, 3, 4, 5, 6, 7, 8, 9, 10, or more) inverted abasic moiety, for example a compound having Formula VI: [chemical structure]
wherein each R3, R4, R5, R6, R7, R8, R10, R11, R12, and R13 is independently H, OH, alkyl, substituted alkyl, alkaryl or aralkyl, F, Cl, Br, CN, CF3, OCF3, OCN, O-alkyl, S-alkyl, N-alkyl, O-alkenyl, S-alkenyl, N-alkenyl, SO-alkyl, alkyl-OSH, alkyl-OH, O-alkyl-OH, O-alkyl-SH, S-alkyl-OH, S-alkyl-SH, alkyl-S-alkyl, alkyl-O-alkyl, ONO2, NO2, N3, NH2, aminoalkyl, aminoacid, aminoacyl, ONH2, O-aminoalkyl, O-aminoacid, O-aminoacyl, heterocycloalkyl, heterocycloalkaryl, aminoalkylamino, polyalklylamino, substituted silyl, or group having Formula I or II; R9 is O, S, CH2, S═O, CHF, or CF2, and either R2, R3, R8 or R13 serve as points of attachment to the siNA molecule of the invention.

[0098] In another embodiment, a siNA molecule of the invention comprises at least one (e.g., about 1, 2, 3, 4, 5, 6, 7, 8, 9, 10, or more) substituted polyalkyl moieties, for example a compound having Formula VII: [chemical structure]
wherein each n is independently an integer from 1 to 12, each R1, R2 and R3 is independently H, OH, alkyl, substituted alkyl, alkaryl or aralkyl, F, Cl, Br, CN, CF3, OCF3, OCN, O-alkyl, S-alkyl, N-alkyl, O-alkenyl, S-alkenyl, N-alkenyl, SO-alkyl, alkyl-OSH, alkyl-OH, O-alkyl-OH, O-alkyl-SH, S-alkyl-OH, S-alkyl-SH, alkyl-S-alkyl, alkyl-O-alkyl, ONO2, NO2, N3, NH2, aminoalkyl, aminoacid, aminoacyl, ONH2, O-aminoalkyl, O-aminoacid, O-aminoacyl, heterocycloalkyl, heterocycloalkaryl, aminoalkylamino, polyalklylamino, substituted silyl, or a group having Formula I, and R1, R2 or R3 serves as points of attachment to the siNA molecule of the invention.

[0099] In another embodiment, the invention features a compound having Formula VII, wherein R1 and R2 are hydroxyl (OH) groups, n=1, and R3 comprises 0 and is the point of attachment to the 3′-end, the 5′-end, or both of the 3′ and 5′-ends of one or both strands of a double-stranded siNA molecule of the invention or to a single-stranded siNA molecule of the invention. This modification is referred to herein as “glyceryl” (for example modification 6 in FIG. 10).

[0100] In another embodiment, a chemically modified nucleoside or non-nucleoside (e.g. a moiety having any of Formula V, VI or VII) of the invention is at the 3′-end, the 5′-end, or both of the 3′ and 5′-ends of a siNA molecule of the invention. For example, chemically modified nucleoside or non-nucleoside (e.g., a moiety having Formula V, VI or VII) can be present at the 3′-end, the 5′-end, or both of the 3′ and 5′-ends of the antisense strand, the sense strand, or both antisense and sense strands of the siNA molecule. In one embodiment, the chemically modified nucleoside or non-nucleoside (e.g., a moiety having Formula V, VI or VII) is present at the 5′-end and 3′-end of the sense strand and the 3′-end of the antisense strand of a double stranded siNA molecule of the invention. In one embodiment, the chemically modified nucleoside or non-nucleoside (e.g., a moiety having Formula V, VI or VII) is present at the terminal position of the 5′-end and 3′-end of the sense strand and the 3′-end of the antisense strand of a double stranded siNA molecule of the invention. In one embodiment, the chemically modified nucleoside or non-nucleoside (e.g., a moiety having Formula V, VI or VII) is present at the two terminal positions of the 5′-end and 3′-end of the sense strand and the 3′-end of the antisense strand of a double stranded siNA molecule of the invention. In one embodiment, the chemically modified nucleoside or non-nucleoside (e.g., a moiety having Formula V, VI or VII) is present at the penultimate position of the 5′-end and 3′-end of the sense strand and the 3′-end of the antisense strand of a double stranded siNA molecule of the invention. In addition, a moiety having Formula VII can be present at the 3′-end or the 5′-end of a hairpin siNA molecule as described herein.

[0101] In another embodiment, a siNA molecule of the invention comprises an abasic residue having Formula V or VI, wherein the abasic residue having Formula VI or VI is connected to the siNA construct in a 3′-3′,3′-2′,2′-3′, or 5′-5′ configuration, such as at the 3′-end, the 5′-end, or both of the 3′ and 5′-ends of one or both siNA strands.

[0102] In one embodiment, a siNA molecule of the invention comprises one or more (e.g., about 1, 2, 3, 4, 5, 6, 7, 8, 9, 10, or more) locked nucleic acid (LNA) nucleotides, for example, at the 5′-end, the 3′-end, both of the 5′ and 3′-ends, or any combination thereof, of the siNA molecule.

[0103] In another embodiment, a siNA molecule of the invention comprises one or more (e.g., about 1, 2, 3, 4, 5, 6, 7, 8, 9, 10, or more) acyclic nucleotides, for example, at the 5′-end, the 3′-end, both of the 5′ and 3′-ends, or any combination thereof, of the siNA molecule.

[0104] In one embodiment, the invention features a chemically-modified short interfering nucleic acid (siNA) molecule of the invention comprising a sense region, wherein any (e.g., one or more or all) pyrimidine nucleotides present in the sense region are 2′-deoxy-2′-fluoro pyrimidine nucleotides (e.g., wherein all pyrimidine nucleotides are 2′-deoxy-2′-fluoro pyrimidine nucleotides or alternately a plurality of pyrimidine nucleotides are 2′-deoxy-2′-fluoro pyrimidine nucleotides), and wherein any (e.g., one or more or all) purine nucleotides present in the sense region are 2′-deoxy purine nucleotides (e.g., wherein all purine nucleotides are 2′-deoxy purine nucleotides or alternately a plurality of purine nucleotides are 2′-deoxy purine nucleotides).

[0105] In one embodiment, the invention features a chemically-modified short interfering nucleic acid (siNA) molecule of the invention comprising a sense region, wherein any (e.g., one or more or all) pyrimidine nucleotides present in the sense region are 2′-deoxy-2′-fluoro pyrimidine nucleotides (e.g., wherein all pyrimidine nucleotides are 2′-deoxy-2′-fluoro pyrimidine nucleotides or alternately a plurality of pyrimidine nucleotides are 2′-deoxy-2′-fluoro pyrimidine nucleotides), and wherein any (e.g., one or more or all) purine nucleotides present in the sense region are 2′-deoxy purine nucleotides (e.g., wherein all purine nucleotides are 2′-deoxy purine nucleotides or alternately a plurality of purine nucleotides are 2′-deoxy purine nucleotides), wherein any nucleotides comprising a 3′-terminal nucleotide overhang that are present in said sense region are 2′-deoxy nucleotides.

[0106] In one embodiment, the invention features a chemically-modified short interfering nucleic acid (siNA) molecule of the invention comprising a sense region, wherein any (e.g., one or more or all) pyrimidine nucleotides present in the sense region are 2′-deoxy-2′-fluoro pyrimidine nucleotides (e.g., wherein all pyrimidine nucleotides are 2′-deoxy-2′-fluoro pyrimidine nucleotides or alternately a plurality of pyrimidine nucleotides are 2′-deoxy-2′-fluoro pyrimidine nucleotides), and wherein any (e.g., one or more or all) purine nucleotides present in the sense region are 2′-O-methyl purine nucleotides (e.g., wherein all purine nucleotides are 2′-O-methyl purine nucleotides or alternately a plurality of purine nucleotides are 2′-O-methyl purine nucleotides).

[0107] In one embodiment, the invention features a chemically-modified short interfering nucleic acid (siNA) molecule of the invention comprising a sense region, wherein any (e.g., one or more or all) pyrimidine nucleotides present in the sense region are 2′-deoxy-2′-fluoro pyrimidine nucleotides (e.g., wherein all pyrimidine nucleotides are 2′-deoxy-2′-fluoro pyrimidine nucleotides or alternately a plurality of pyrimidine nucleotides are 2′-deoxy-2′-fluoro pyrimidine nucleotides), wherein any (e.g., one or more or all) purine nucleotides present in the sense region are 2′-O-methyl purine nucleotides (e.g., wherein all purine nucleotides are 2′-O-methyl purine nucleotides or alternately a plurality of purine nucleotides are 2′-O-methyl purine nucleotides), and wherein any nucleotides comprising a 3′-terminal nucleotide overhang that are present in said sense region are 2′-deoxy nucleotides.

[0108] In one embodiment, the invention features a chemically-modified short interfering nucleic acid (siNA) molecule of the invention comprising an antisense region, wherein any (e.g., one or more or all) pyrimidine nucleotides present in the antisense region are 2′-deoxy-2′-fluoro pyrimidine nucleotides (e.g., wherein all pyrimidine nucleotides are 2′-deoxy-2′-fluoro pyrimidine nucleotides or alternately a plurality of pyrimidine nucleotides are 2′-deoxy-2′-fluoro pyrimidine nucleotides), and wherein any (e.g., one or more or all) purine nucleotides present in the antisense region are 2′-O-methyl purine nucleotides (e.g., wherein all purine nucleotides are 2′-O-methyl purine nucleotides or alternately a plurality of purine nucleotides are 2′-O-methyl purine nucleotides).

[0109] In one embodiment, the invention features a chemically-modified short interfering nucleic acid (siNA) molecule of the invention comprising an antisense region, wherein any (e.g., one or more or all) pyrimidine nucleotides present in the antisense region are 2′-deoxy-2′-fluoro pyrimidine nucleotides (e.g., wherein all pyrimidine nucleotides are 2′-deoxy-2′-fluoro pyrimidine nucleotides or alternately a plurality of pyrimidine nucleotides are 2′-deoxy-2′-fluoro pyrimidine nucleotides), wherein any (e.g., one or more or all) purine nucleotides present in the antisense region are 2′-O-methyl purine nucleotides (e.g., wherein all purine nucleotides are 2′-O-methyl purine nucleotides or alternately a plurality of purine nucleotides are 2′-O-methyl purine nucleotides), and wherein any nucleotides comprising a 3′-terminal nucleotide overhang that are present in said antisense region are 2′-deoxy nucleotides.

[0110] In one embodiment, the invention features a chemically-modified short interfering nucleic acid (siNA) molecule of the invention comprising an antisense region, wherein any (e.g., one or more or all) pyrimidine nucleotides present in the antisense region are 2′-deoxy-2′-fluoro pyrimidine nucleotides (e.g., wherein all pyrimidine nucleotides are 2′-deoxy-2′-fluoro pyrimidine nucleotides or alternately a plurality of pyrimidine nucleotides are 2′-deoxy-2′-fluoro pyrimidine nucleotides), and wherein any (e.g., one or more or all) purine nucleotides present in the antisense region are 2′-deoxy purine nucleotides (e.g., wherein all purine nucleotides are 2′-deoxy purine nucleotides or alternately a plurality of purine nucleotides are 2′-deoxy purine nucleotides).

[0111] In one embodiment, the invention features a chemically-modified short interfering nucleic acid (siNA) molecule of the invention comprising an antisense region, wherein any (e.g., one or more or all) pyrimidine nucleotides present in the antisense region are 2′-deoxy-2′-fluoro pyrimidine nucleotides (e.g., wherein all pyrimidine nucleotides are 2′-deoxy-2′-fluoro pyrimidine nucleotides or alternately a plurality of pyrimidine nucleotides are 2′-deoxy-2′-fluoro pyrimidine nucleotides), and wherein any (e.g., one or more or all) purine nucleotides present in the antisense region are 2′-O-methyl purine nucleotides (e.g., wherein all purine nucleotides are 2′-O-methyl purine nucleotides or alternately a plurality of purine nucleotides are 2′-O-methyl purine nucleotides).

[0112] In one embodiment, the invention features a chemically-modified short interfering nucleic acid (siNA) molecule of the invention capable of mediating RNA interference (RNAi) against MAP kinase inside a cell or reconstituted in vitro system comprising a sense region, wherein one or more pyrimidine nucleotides present in the sense region are 2′-deoxy-2′-fluoro pyrimidine nucleotides (e.g., wherein all pyrimidine nucleotides are 2′-deoxy-2′-fluoro pyrimidine nucleotides or alternately a plurality of pyrimidine nucleotides are 2′-deoxy-2′-fluoro pyrimidine nucleotides), and one or more purine nucleotides present in the sense region are 2′-deoxy purine nucleotides (e.g., wherein all purine nucleotides are 2′-deoxy purine nucleotides or alternately a plurality of purine nucleotides are 2′-deoxy purine nucleotides), and an antisense region, wherein one or more pyrimidine nucleotides present in the antisense region are 2′-deoxy-2′-fluoro pyrimidine nucleotides (e.g., wherein all pyrimidine nucleotides are 2′-deoxy-2′-fluoro pyrimidine nucleotides or alternately a plurality of pyrimidine nucleotides are 2′-deoxy-2′-fluoro pyrimidine nucleotides), and one or more purine nucleotides present in the antisense region are 2′-O-methyl purine nucleotides (e.g., wherein all purine nucleotides are 2′-O-methyl purine nucleotides or alternately a plurality of purine nucleotides are 2′-O-methyl purine nucleotides). The sense region and/or the antisense region can have a terminal cap modification, such as any modification described herein or shown in FIG. 10, that is optionally present at the 3′-end, the 5′-end, or both of the 3′ and 5′-ends of the sense and/or antisense sequence. The sense and/or antisense region can optionally further comprise a 3′-terminal nucleotide overhang having about 1 to about 4 (e.g., about 1, 2, 3, or 4) 2′-deoxynucleotides. The overhang nucleotides can further comprise one or more (e.g., about 1, 2, 3, 4 or more) phosphorothioate, phosphonoacetate, and/or thiophosphonoacetate internucleotide linkages. Non-limiting examples of these chemically-modified siNAs are shown in FIGS. 4 and 5 and Tables III and IV herein. In any of these described embodiments, the purine nucleotides present in the sense region are alternatively 2′-O-methyl purine nucleotides (e.g., wherein all purine nucleotides are 2′-O-methyl purine nucleotides or alternately a plurality of purine nucleotides are 2′-O-methyl purine nucleotides) and one or more purine nucleotides present in the antisense region are 2′-O-methyl purine nucleotides (e.g., wherein all purine nucleotides are 2′-O-methyl purine nucleotides or alternately a plurality of purine nucleotides are 2′-O-methyl purine nucleotides). Also, in any of these embodiments, one or more purine nucleotides present in the sense region are alternatively purine ribonucleotides (e.g., wherein all purine nucleotides are purine ribonucleotides or alternately a plurality of purine nucleotides are purine ribonucleotides) and any purine nucleotides present in the antisense region are 2′-O-methyl purine nucleotides (e.g., wherein all purine nucleotides are 2′-O-methyl purine nucleotides or alternately a plurality of purine nucleotides are 2′-O-methyl purine nucleotides). Additionally, in any of these embodiments, one or more purine nucleotides present in the sense region and/or present in the antisense region are alternatively selected from the group consisting of 2′-deoxy nucleotides, locked nucleic acid (LNA) nucleotides, 2′-methoxyethyl nucleotides, 4′-thionucleotides, and 2′-O-methyl nucleotides (e.g., wherein all purine nucleotides are selected from the group consisting of 2′-deoxy nucleotides, locked nucleic acid (LNA) nucleotides, 2′-methoxyethyl nucleotides, 4′-thionucleotides, and 2′-O-methyl nucleotides or alternately a plurality of purine nucleotides are selected from the group consisting of 2′-deoxy nucleotides, locked nucleic acid (LNA) nucleotides, 2′-methoxyethyl nucleotides, 4′-thionucleotides, and 2′-O-methyl nucleotides).

[0113] In another embodiment, any modified nucleotides present in the siNA molecules of the invention, preferably in the antisense strand of the siNA molecules of the invention, but also optionally in the sense and/or both antisense and sense strands, comprise modified nucleotides having properties or characteristics similar to naturally occurring ribonucleotides. For example, the invention features siNA molecules including modified nucleotides having a Northern conformation (e.g., Northern pseudorotation cycle, see for example Saenger, Principles of Nucleic Acid Structure, Springer-Verlag ed., 1984). As such, chemically modified nucleotides present in the siNA molecules of the invention, preferably in the antisense strand of the siNA molecules of the invention, but also optionally in the sense and/or both antisense and sense strands, are resistant to nuclease degradation while at the same time maintaining the capacity to mediate RNAi. Non-limiting examples of nucleotides having a northern configuration include locked nucleic acid (LNA) nucleotides (e.g., 2′-O, 4′-C-methylene-(D-ribofuranosyl) nucleotides); 2′-methoxyethoxy (MOE) nucleotides; 2′-methyl-thio-ethyl, 2′-deoxy-2′-fluoro nucleotides, 2′-deoxy-2′-chloro nucleotides, 2′-azido nucleotides, and 2′-O-methyl nucleotides.

[0114] In one embodiment, the sense strand of a double stranded siNA molecule of the invention comprises a terminal cap moiety, (see for example FIG. 10) such as an inverted deoxyabaisc moiety, at the 3′-end, 5′-end, or both 3′ and 5′-ends of the sense strand.

[0115] In one embodiment, the invention features a chemically-modified short interfering nucleic acid molecule (siNA) capable of mediating RNA interference (RNAi) against MAP kinase inside a cell or reconstituted in vitro system, wherein the chemical modification comprises a conjugate covalently attached to the chemically-modified siNA molecule. Non-limiting examples of conjugates contemplated by the invention include conjugates and ligands described in Vargeese et al, U.S. Ser. No. 10/427,160, filed Apr. 30, 2003, incorporated by reference herein in its entirety, including the drawings. In another embodiment, the conjugate is covalently attached to the chemically-modified siNA molecule via a biodegradable linker. In one embodiment, the conjugate molecule is attached at the 3′-end of either the sense strand, the antisense strand, or both strands of the chemically-modified siNA molecule. In another embodiment, the conjugate molecule is attached at the 5′-end of either the sense strand, the antisense strand, or both strands of the chemically-modified siNA molecule. In yet another embodiment, the conjugate molecule is attached both the 3′-end and 5′-end of either the sense strand, the antisense strand, or both strands of the chemically-modified siNA molecule, or any combination thereof. In one embodiment, a conjugate molecule of the invention comprises a molecule that facilitates delivery of a chemically-modified siNA molecule into a biological system, such as a cell. In another embodiment, the conjugate molecule attached to the chemically-modified siNA molecule is a polyethylene glycol, human serum albumin, or a ligand for a cellular receptor that can mediate cellular uptake. Examples of specific conjugate molecules contemplated by the instant invention that can be attached to chemically-modified siNA molecules are described in Vargeese et al., U.S. Ser. No. 10/201,394, filed Jul. 22, 2002 incorporated by reference herein. The type of conjugates used and the extent of conjugation of siNA molecules of the invention can be evaluated for improved pharmacokinetic profiles, bioavailability, and/or stability of siNA constructs while at the same time maintaining the ability of the siNA to mediate RNAi activity. As such, one skilled in the art can screen siNA constructs that are modified with various conjugates to determine whether the siNA conjugate complex possesses improved properties while maintaining the ability to mediate RNAi, for example in animal models as are generally known in the art.

[0116] In one embodiment, the invention features a short interfering nucleic acid (siNA) molecule of the invention, wherein the siNA further comprises a nucleotide, non-nucleotide, or mixed nucleotide/non-nucleotide linker that joins the sense region of the siNA to the antisense region of the siNA. In one embodiment, a nucleotide linker of the invention can be a linker of >2 nucleotides in length, for example about 3, 4, 5, 6, 7, 8, 9, or 10 nucleotides in length. In another embodiment, the nucleotide linker can be a nucleic acid aptamer. By “aptamer” or “nucleic acid aptamer” as used herein is meant a nucleic acid molecule that binds specifically to a target molecule wherein the nucleic acid molecule has sequence that comprises a sequence recognized by the target molecule in its natural setting. Alternately, an aptamer can be a nucleic acid molecule that binds to a target molecule where the target molecule does not naturally bind to a nucleic acid. The target molecule can be any molecule of interest. For example, the aptamer can be used to bind to a ligand-binding domain of a protein, thereby preventing interaction of the naturally occurring ligand with the protein. This is a non-limiting example and those in the art will recognize that other embodiments can be readily generated using techniques generally known in the art. (See, for example, Gold et al., 1995, Annu. Rev. Biochem., 64, 763; Brody and Gold, 2000, J. Biotechnol., 74, 5; Sun, 2000, Curr. Opin. Mol. Ther., 2, 100; Kusser, 2000, J Biotechnol., 74, 27; Hermann and Patel, 2000, Science, 287, 820; and Jayasena, 1999, Clinical Chemistry, 45, 1628.)

[0117] In yet another embodiment, a non-nucleotide linker of the invention comprises abasic nucleotide, polyether, polyamine, polyamide, peptide, carbohydrate, lipid, polyhydrocarbon, or other polymeric compounds (e.g. polyethylene glycols such as those having between 2 and 100 ethylene glycol units). Specific examples include those described by Seela and Kaiser, Nucleic Acids Res. 1990, 18:6353 and Nucleic Acids Res. 1987, 15:3113; Cload and Schepartz, J. Am. Chem. Soc. 1991, 113:6324; Richardson and Schepartz, J. Am. Chem. Soc. 1991, 113:5109; Ma et al., Nucleic Acids Res. 1993, 21:2585 and Biochemistry 1993, 32:1751; Durand et al., Nucleic Acids Res. 1990, 18:6353; McCurdy et al., Nucleosides & Nucleotides 1991, 10:287; Jschke et al., Tetrahedron Lett. 1993, 34:301; Ono et al., Biochemistry 1991, 30:9914; Arnold et al., International Publication No. WO 89/02439; Usman et al., International Publication No. WO 95/06731; Dudycz et al., International Publication No. WO 95/11910 and Ferentz and Verdine, J. Am. Chem. Soc. 1991, 113:4000, all hereby incorporated by reference herein. A “non-nucleotide” further means any group or compound that can be incorporated into a nucleic acid chain in the place of one or more nucleotide units, including either sugar and/or phosphate substitutions, and allows the remaining bases to exhibit their enzymatic activity. The group or compound can be abasic in that it does not contain a commonly recognized nucleotide base, such as adenosine, guanine, cytosine, uracil or thymine, for example at the C1 position of the sugar.

[0118] In one embodiment, the invention features a short interfering nucleic acid (siNA) molecule capable of mediating RNA interference (RNAi) inside a cell or reconstituted in vitro system, wherein one or both strands of the siNA molecule that are assembled from two separate oligonucleotides do not comprise any ribonucleotides. For example, a siNA molecule can be assembled from a single oligonculeotide where the sense and antisense regions of the siNA comprise separate oligonucleotides that do not have any ribonucleotides (e.g., nucleotides having a 2′-OH group) present in the oligonucleotides. In another example, a siNA molecule can be assembled from a single oligonculeotide where the sense and antisense regions of the siNA are linked or circularized by a nucleotide or non-nucleotide linker as described herein, wherein the oligonucleotide does not have any ribonucleotides (e.g., nucleotides having a 2′-OH group) present in the oligonucleotide. Applicant has surprisingly found that the presense of ribonucleotides (e.g., nucleotides having a 2′-hydroxyl group) within the siNA molecule is not required or essential to support RNAi activity. As such, in one embodiment, all positions within the siNA can include chemically modified nucleotides and/or non-nucleotides such as nucleotides and or non-nucleotides having Formula I, II, III, IV, V, VI, or VII or any combination thereof to the extent that the ability of the siNA molecule to support RNAi activity in a cell is maintained.

[0119] In one embodiment, a siNA molecule of the invention is a single stranded siNA molecule that mediates RNAi activity in a cell or reconstituted in vitro system comprising a single stranded polynucleotide having complementarity to a target nucleic acid sequence. In another embodiment, the single stranded siNA molecule of the invention comprises a 5′-terminal phosphate group. In another embodiment, the single stranded siNA molecule of the invention comprises a 5′-terminal phosphate group and a 3′-terminal phosphate group (e.g., a 2′,3′-cyclic phosphate). In another embodiment, the single stranded siNA molecule of the invention comprises about 15 to about 30 (e.g., about 15, 16, 17, 18, 19, 20, 21, 22, 23, 24, 25, 26, 27, 28, 29, or 30) nucleotides. In yet another embodiment, the single stranded siNA molecule of the invention comprises one or more chemically modified nucleotides or non-nucleotides described herein. For example, all the positions within the siNA molecule can include chemically-modified nucleotides such as nucleotides having any of Formulae I-VII, or any combination thereof to the extent that the ability of the siNA molecule to support RNAi activity in a cell is maintained.

[0120] In one embodiment, a siNA molecule of the invention is a single stranded siNA molecule that mediates RNAi activity in a cell or reconstituted in vitro system comprising a single stranded polynucleotide having complementarity to a target nucleic acid sequence, wherein one or more pyrimidine nucleotides present in the siNA are 2′-deoxy-2′-fluoro pyrimidine nucleotides (e.g., wherein all pyrimidine nucleotides are 2′-deoxy-2′-fluoro pyrimidine nucleotides or alternately a plurality of pyrimidine nucleotides are 2′-deoxy-2′-fluoro pyrimidine nucleotides), and wherein any purine nucleotides present in the antisense region are 2′-O-methyl purine nucleotides (e.g., wherein all purine nucleotides are 2′-O-methyl purine nucleotides or alternately a plurality of purine nucleotides are 2′-O-methyl purine nucleotides), and a terminal cap modification, such as any modification described herein or shown in FIG. 10, that is optionally present at the 3′-end, the 5′-end, or both of the 3′ and 5′-ends of the antisense sequence. The siNA optionally further comprises about 1 to about 4 or more (e.g., about 1, 2, 3, 4 or more) terminal 2′-deoxynucleotides at the 3′-end of the siNA molecule, wherein the terminal nucleotides can further comprise one or more (e.g., 1, 2, 3, 4 or more) phosphorothioate, phosphonoacetate, and/or thiophosphonoacetate internucleotide linkages, and wherein the siNA optionally further comprises a terminal phosphate group, such as a 5′-terminal phosphate group. In any of these embodiments, any purine nucleotides present in the antisense region are alternatively 2′-deoxy purine nucleotides (e.g., wherein all purine nucleotides are 2′-deoxy purine nucleotides or alternately a plurality of purine nucleotides are 2′-deoxy purine nucleotides). Also, in any of these embodiments, any purine nucleotides present in the siNA (i.e., purine nucleotides present in the sense and/or antisense region) can alternatively be locked nucleic acid (LNA) nucleotides (e.g., wherein all purine nucleotides are LNA nucleotides or alternately a plurality of purine nucleotides are LNA nucleotides). Also, in any of these embodiments, any purine nucleotides present in the siNA are alternatively 2′-methoxyethyl purine nucleotides (e.g., wherein all purine nucleotides are 2′-methoxyethyl purine nucleotides or alternately a plurality of purine nucleotides are 2′-methoxyethyl purine nucleotides). In another embodiment, any modified nucleotides present in the single stranded siNA molecules of the invention comprise modified nucleotides having properties or characteristics similar to naturally occurring ribonucleotides. For example, the invention features siNA molecules including modified nucleotides having a Northern conformation (e.g., Northern pseudorotation cycle, see for example Saenger, Principles of Nucleic Acid Structure, Springer-Verlag ed., 1984). As such, chemically modified nucleotides present in the single stranded siNA molecules of the invention are preferably resistant to nuclease degradation while at the same time maintaining the capacity to mediate RNAi.

[0121] In one embodiment, a siNA molecule of the invention comprises chemically modified nucleotides or non-nucleotides (e.g., having any of Formulae I-VII, such as 2′-deoxy, 2′-deoxy-2′-fluoro, or 2′-O-methyl nucleotides) at alternating positions within one or more strands or regions of the siNA molecule. For example, such chemical modifications can be introduced at every other position of a RNA based siNA molecule, starting at either the first or second nucleotide from the 3′-end or 5′-end of the siNA. In a non-limiting example, a double stranded siNA molecule of the invention in which each strand of the siNA is 21 nucleotides in length is featured wherein positions 1, 3, 5, 7, 9, 11, 13, 15, 17, 19 and 21 of each strand are chemically modified (e.g., with compounds having any of Formulae 1-VII, such as such as 2′-deoxy, 2′-deoxy-2′-fluoro, or 2′-O-methyl nucleotides). In another non-limiting example, a double stranded siNA molecule of the invention in which each strand of the siNA is 21 nucleotides in length is featured wherein positions 2, 4, 6, 8, 10, 12, 14, 16, 18, and 20 of each strand are chemically modified (e.g., with compounds having any of Formulae 1-VII, such as such as 2′-deoxy, 2′-deoxy-2′-fluoro, or 2′-O-methyl nucleotides). Such siNA molecules can further comprise terminal cap moieties and/or backbone modifications as described herein.

[0122] In one embodiment, the invention features a method for modulating the expression of a MAP kinase gene within a cell comprising: (a) synthesizing a siNA molecule of the invention, which can be chemically-modified, wherein one of the siNA strands comprises a sequence complementary to RNA of the MAP kinase gene; and (b) introducing the siNA molecule into a cell under conditions suitable to modulate the expression of the MAP kinase gene in the cell.

[0123] In one embodiment, the invention features a method for modulating the expression of a MAP kinase gene within a cell comprising: (a) synthesizing a siNA molecule of the invention, which can be chemically-modified, wherein one of the siNA strands comprises a sequence complementary to RNA of the MAP kinase gene and wherein the sense strand sequence of the siNA comprises a sequence identical or substantially similar to the sequence of the target RNA; and (b) introducing the siNA molecule into a cell under conditions suitable to modulate the expression of the MAP kinase gene in the cell.

[0124] In another embodiment, the invention features a method for modulating the expression of more than one MAP kinase gene within a cell comprising: (a) synthesizing siNA molecules of the invention, which can be chemically-modified, wherein one of the siNA strands comprises a sequence complementary to RNA of the MAP kinase genes; and (b) introducing the siNA molecules into a cell under conditions suitable to modulate the expression of the MAP kinase genes in the cell.

[0125] In another embodiment, the invention features a method for modulating the expression of two or more MAP kinase genes within a cell comprising: (a) synthesizing one or more siNA molecules of the invention, which can be chemically-modified, wherein the siNA strands comprise sequences complementary to RNA of the MAP kinase genes and wherein the sense strand sequences of the siNAs comprise sequences identical or substantially similar to the sequences of the target RNAs; and (b) introducing the siNA molecules into a cell under conditions suitable to modulate the expression of the MAP kinase genes in the cell.

[0126] In another embodiment, the invention features a method for modulating the expression of more than one MAP kinase gene within a cell comprising: (a) synthesizing a siNA molecule of the invention, which can be chemically-modified, wherein one of the siNA strands comprises a sequence complementary to RNA of the MAP kinase gene and wherein the sense strand sequence of the siNA comprises a sequence identical or substantially similar to the sequences of the target RNAs; and (b) introducing the siNA molecule into a cell under conditions suitable to modulate the expression of the MAP kinase genes in the cell.

[0127] In one embodiment, siNA molecules of the invention are used as reagents in ex vivo applications. For example, siNA reagents are introduced into tissue or cells that are transplanted into a subject for therapeutic effect. The cells and/or tissue can be derived from an organism or subject that later receives the explant, or can be derived from another organism or subject prior to transplantation. The siNA molecules can be used to modulate the expression of one or more genes in the cells or tissue, such that the cells or tissue obtain a desired phenotype or are able to perform a function when transplanted in vivo. In one embodiment, certain target cells from a patient are extracted. These extracted cells are contacted with siNAs targeting a specific nucleotide sequence within the cells under conditions suitable for uptake of the siNAs by these cells (e.g. using delivery reagents such as cationic lipids, liposomes and the like or using techniques such as electroporation to facilitate the delivery of siNAs into cells). The cells are then reintroduced back into the same patient or other patients. In one embodiment, the invention features a method of modulating the expression of a MAP kinase gene in a tissue explant comprising: (a) synthesizing a siNA molecule of the invention, which can be chemically-modified, wherein one of the siNA strands comprises a sequence complementary to RNA of the MAP kinase gene; and (b) introducing the siNA molecule into a cell of the tissue explant derived from a particular organism under conditions suitable to modulate the expression of the MAP kinase gene in the tissue explant. In another embodiment, the method further comprises introducing the tissue explant back into the organism the tissue was derived from or into another organism under conditions suitable to modulate the expression of the MAP kinase gene in that organism.

[0128] In one embodiment, the invention features a method of modulating the expression of a MAP kinase gene in a tissue explant comprising: (a) synthesizing a siNA molecule of the invention, which can be chemically-modified, wherein one of the siNA strands comprises a sequence complementary to RNA of the MAP kinase gene and wherein the sense strand sequence of the siNA comprises a sequence identical or substantially similar to the sequence of the target RNA; and (b) introducing the siNA molecule into a cell of the tissue explant derived from a particular organism under conditions suitable to modulate the expression of the MAP kinase gene in the tissue explant. In another embodiment, the method further comprises introducing the tissue explant back into the organism the tissue was derived from or into another organism under conditions suitable to modulate the expression of the MAP kinase gene in that organism.

[0129] In another embodiment, the invention features a method of modulating the expression of more than one MAP kinase gene in a tissue explant comprising: (a) synthesizing siNA molecules of the invention, which can be chemically-modified, wherein one of the siNA strands comprises a sequence complementary to RNA of the MAP kinase genes; and (b) introducing the siNA molecules into a cell of the tissue explant derived from a particular organism under conditions suitable to modulate the expression of the MAP kinase genes in the tissue explant. In another embodiment, the method further comprises introducing the tissue explant back into the organism the tissue was derived from or into another organism under conditions suitable to modulate the expression of the MAP kinase genes in that organism.

[0130] In one embodiment, the invention features a method of modulating the expression of a MAP kinase gene in a subject or organism comprising: (a) synthesizing a siNA molecule of the invention, which can be chemically-modified, wherein one of the siNA strands comprises a sequence complementary to RNA of the MAP kinase gene; and (b) introducing the siNA molecule into the subject or organism under conditions suitable to modulate the expression of the MAP kinase gene in the subject or organism. The level of MAP kinase protein or RNA can be determined using various methods well-known in the art.

[0131] In another embodiment, the invention features a method of modulating the expression of more than one MAP kinase gene in a subject or organism comprising: (a) synthesizing siNA molecules of the invention, which can be chemically-modified, wherein one of the siNA strands comprises a sequence complementary to RNA of the MAP kinase genes; and (b) introducing the siNA molecules into the subject or organism under conditions suitable to modulate the expression of the MAP kinase genes in the subject or organism. The level of MAP kinase protein or RNA can be determined as is known in the art.

[0132] In one embodiment, the invention features a method for modulating the expression of a MAP kinase gene within a cell comprising: (a) synthesizing a siNA molecule of the invention, which can be chemically-modified, wherein the siNA comprises a single stranded sequence having complementarity to RNA of the MAP kinase gene; and (b) introducing the siNA molecule into a cell under conditions suitable to modulate the expression of the MAP kinase gene in the cell.

[0133] In another embodiment, the invention features a method for modulating the expression of more than one MAP kinase gene within a cell comprising: (a) synthesizing siNA molecules of the invention, which can be chemically-modified, wherein the siNA comprises a single stranded sequence having complementarity to RNA of the MAP kinase gene; and (b) contacting the cell in vitro or in vivo with the siNA molecule under conditions suitable to modulate the expression of the MAP kinase genes in the cell.

[0134] In one embodiment, the invention features a method of modulating the expression of a MAP kinase gene in a tissue explant comprising: (a) synthesizing a siNA molecule of the invention, which can be chemically-modified, wherein the siNA comprises a single stranded sequence having complementarity to RNA of the MAP kinase gene; and (b) contacting a cell of the tissue explant derived from a particular subject or organism with the siNA molecule under conditions suitable to modulate the expression of the MAP kinase gene in the tissue explant. In another embodiment, the method further comprises introducing the tissue explant back into the subject or organism the tissue was derived from or into another subject or organism under conditions suitable to modulate the expression of the MAP kinase gene in that subject or organism.

[0135] In another embodiment, the invention features a method of modulating the expression of more than one MAP kinase gene in a tissue explant comprising: (a) synthesizing siNA molecules of the invention, which can be chemically-modified, wherein the siNA comprises a single stranded sequence having complementarity to RNA of the MAP kinase gene; and (b) introducing the siNA molecules into a cell of the tissue explant derived from a particular subject or organism under conditions suitable to modulate the expression of the MAP kinase genes in the tissue explant. In another embodiment, the method further comprises introducing the tissue explant back into the subject or organism the tissue was derived from or into another subject or organism under conditions suitable to modulate the expression of the MAP kinase genes in that subject or organism.

[0136] In one embodiment, the invention features a method of modulating the expression of a MAP kinase gene in a subject or organism comprising: (a) synthesizing a siNA molecule of the invention, which can be chemically-modified, wherein the siNA comprises a single stranded sequence having complementarity to RNA of the MAP kinase gene; and (b) introducing the siNA molecule into the subject or organism under conditions suitable to modulate the expression of the MAP kinase gene in the subject or organism.

[0137] In another embodiment, the invention features a method of modulating the expression of more than one MAP kinase gene in a subject or organism comprising: (a) synthesizing siNA molecules of the invention, which can be chemically-modified, wherein the siNA comprises a single stranded sequence having complementarity to RNA of the MAP kinase gene; and (b) introducing the siNA molecules into the subject or organism under conditions suitable to modulate the expression of the MAP kinase genes in the subject or organism.

[0138] In one embodiment, the invention features a method of modulating the expression of a MAP kinase gene in a subject or organism comprising contacting the subject or organism with a siNA molecule of the invention under conditions suitable to modulate the expression of the MAP kinase gene in the subject or organism.

[0139] In one embodiment, the invention features a method for treating or preventing an inflammatory disease, disorder, or condition in a subject or organism comprising contacting the subject or organism with a siNA molecule of the invention under conditions suitable to modulate the expression of the MAP kinase gene in the subject or organism.

[0140] In one embodiment, the invention features a method for treating or preventing a neurologic disease, disorder, or condition in a subject or organism comprising contacting the subject or organism with a siNA molecule of the invention under conditions suitable to modulate the expression of the MAP kinase gene in the subject or organism.

[0141] In one embodiment, the invention features a method for treating or preventing an ocular disease, disorder, or condition in a subject or organism comprising contacting the subject or organism with a siNA molecule of the invention under conditions suitable to modulate the expression of the MAP kinase gene in the subject or organism.

[0142] In one embodiment, the invention features a method for treating or preventing a respiratory disease, disorder, or condition in a subject or organism comprising contacting the subject or organism with a siNA molecule of the invention under conditions suitable to modulate the expression of the MAP kinase gene in the subject or organism.

[0143] In one embodiment, the invention features a method for treating or preventing an autoimmune disease, disorder, and/or condition in a subject or organism comprising contacting the subject or organism with a siNA molecule of the invention under conditions suitable to modulate the expression of the MAP kinase gene in the subject or organism.

[0144] In one embodiment, the invention features a method for treating or preventing an allergic disease, disorder, and/or condition in a subject or organism comprising contacting the subject or organism with a siNA molecule of the invention under conditions suitable to modulate the expression of the MAP kinase gene in the subject or organism.

[0145] In one embodiment, the invention features a method for treating or preventing a proliferative disease, disorder, and/or condition in a subject or organism comprising contacting the subject or organism with a siNA molecule of the invention under conditions suitable to modulate the expression of the MAP kinase gene in the subject or organism.

[0146] In one embodiment, the invention features a method for treating or preventing cancer in a subject or organism comprising contacting the subject or organism with a siNA molecule of the invention under conditions suitable to modulate the expression of the MAP kinase gene in the subject or organism.

[0147] In another embodiment, the invention features a method of modulating the expression of more than one MAP kinase genes in a subject or organism comprising contacting the subject or organism with one or more siNA molecules of the invention under conditions suitable to modulate the expression of the MAP kinase genes in the subject or organism.

[0148] The siNA molecules of the invention can be designed to down regulate or inhibit target (e.g., MAP kinase) gene expression through RNAi targeting of a variety of RNA molecules. In one embodiment, the siNA molecules of the invention are used to target various RNAs corresponding to a target gene. Non-limiting examples of such RNAs include messenger RNA (mRNA), alternate RNA splice variants of target gene(s), post-transcriptionally modified RNA of target gene(s), pre-mRNA of target gene(s), and/or RNA templates. If alternate splicing produces a family of transcripts that are distinguished by usage of appropriate exons, the instant invention can be used to inhibit gene expression through the appropriate exons to specifically inhibit or to distinguish among the functions of gene family members. For example, a protein that contains an alternatively spliced transmembrane domain can be expressed in both membrane bound and secreted forms. Use of the invention to target the exon containing the transmembrane domain can be used to determine the functional consequences of pharmaceutical targeting of membrane bound as opposed to the secreted form of the protein. Non-limiting examples of applications of the invention relating to targeting these RNA molecules include therapeutic pharmaceutical applications, pharmaceutical discovery applications, molecular diagnostic and gene function applications, and gene mapping, for example using single nucleotide polymorphism mapping with siNA molecules of the invention. Such applications can be implemented using known gene sequences or from partial sequences available from an expressed sequence tag (EST).

[0149] In another embodiment, the siNA molecules of the invention are used to target conserved sequences corresponding to a gene family or gene families such as MAP kinase family genes. As such, siNA molecules targeting multiple MAP kinase targets can provide increased therapeutic effect. In addition, siNA can be used to characterize pathways of gene function in a variety of applications. For example, the present invention can be used to inhibit the activity of target gene(s) in a pathway to determine the function of uncharacterized gene(s) in gene function analysis, mRNA function analysis, or translational analysis. The invention can be used to determine potential target gene pathways involved in various diseases and conditions toward pharmaceutical development. The invention can be used to understand pathways of gene expression involved in, for example cancer, inflammatory, autoimmune, neuroligic, ocular, respiratory, allergic, and/or proliferative diseases, disorders and conditions.

[0150] In one embodiment, siNA molecule(s) and/or methods of the invention are used to down regulate the expression of gene(s) that encode RNA referred to by Genbank Accession, for example, MAP kinase genes encoding RNA sequence(s) referred to herein by Genbank Accession number, for example, Genbank Accession Nos. shown in Table I.

[0151] In one embodiment, the invention features a method comprising: (a) generating a library of siNA constructs having a predetermined complexity; and (b) assaying the siNA constructs of (a) above, under conditions suitable to determine RNAi target sites within the target RNA sequence. In one embodiment, the siNA molecules of (a) have strands of a fixed length, for example, about 23 nucleotides in length. In another embodiment, the siNA molecules of (a) are of differing length, for example having strands of about 15 to about 30 (e.g., about 15, 16, 17, 18, 19, 20, 21, 22, 23, 24, 25, 26, 27, 28, 29, or 30) nucleotides in length. In one embodiment, the assay can comprise a reconstituted in vitro siNA assay as described herein. In another embodiment, the assay can comprise a cell culture system in which target RNA is expressed. In another embodiment, fragments of target RNA are analyzed for detectable levels of cleavage, for example by gel electrophoresis, northern blot analysis, or RNAse protection assays, to determine the most suitable target site(s) within the target RNA sequence. The target RNA sequence can be obtained as is known in the art, for example, by cloning and/or transcription for in vitro systems, and by cellular expression in in vivo systems.

[0152] In one embodiment, the invention features a method comprising: (a) generating a randomized library of siNA constructs having a predetermined complexity, such as of 4N, where N represents the number of base paired nucleotides in each of the siNA construct strands (eg. for a siNA construct having 21 nucleotide sense and antisense strands with 19 base pairs, the complexity would be 4¹⁹); and (b) assaying the siNA constructs of (a) above, under conditions suitable to determine RNAi target sites within the target MAP kinase RNA sequence. In another embodiment, the siNA molecules of (a) have strands of a fixed length, for example about 23 nucleotides in length. In yet another embodiment, the siNA molecules of (a) are of differing length, for example having strands of about 15 to about 30 (e.g., about 15, 16, 17, 18, 19, 20, 21, 22, 23, 24, 25, 26, 27, 28, 29, or 30) nucleotides in length. In one embodiment, the assay can comprise a reconstituted in vitro siNA assay as described in Example 6 herein. In another embodiment, the assay can comprise a cell culture system in which target RNA is expressed. In another embodiment, fragments of MAP kinase RNA are analyzed for detectable levels of cleavage, for example, by gel electrophoresis, northern blot analysis, or RNAse protection assays, to determine the most suitable target site(s) within the target MAP kinase RNA sequence. The target MAP kinase RNA sequence can be obtained as is known in the art, for example, by cloning and/or transcription for in vitro systems, and by cellular expression in in vivo systems.

[0153] In another embodiment, the invention features a method comprising: (a) analyzing the sequence of a RNA target encoded by a target gene; (b) synthesizing one or more sets of siNA molecules having sequence complementary to one or more regions of the RNA of (a); and (c) assaying the siNA molecules of (b) under conditions suitable to determine RNAi targets within the target RNA sequence. In one embodiment, the siNA molecules of (b) have strands of a fixed length, for example about 23 nucleotides in length. In another embodiment, the siNA molecules of (b) are of differing length, for example having strands of about 15 to about 30 (e.g., about 15, 16, 17, 18, 19, 20, 21, 22, 23, 24, 25, 26, 27, 28, 29, or 30) nucleotides in length. In one embodiment, the assay can comprise a reconstituted in vitro siNA assay as described herein. In another embodiment, the assay can comprise a cell culture system in which target RNA is expressed. Fragments of target RNA are analyzed for detectable levels of cleavage, for example by gel electrophoresis, northern blot analysis, or RNAse protection assays, to determine the most suitable target site(s) within the target RNA sequence. The target RNA sequence can be obtained as is known in the art, for example, by cloning and/or transcription for in vitro systems, and by expression in in vivo systems.

[0154] By “target site” is meant a sequence within a target RNA that is “targeted” for cleavage mediated by a siNA construct which contains sequences within its antisense region that are complementary to the target sequence.

[0155] By “detectable level of cleavage” is meant cleavage of target RNA (and formation of cleaved product RNAs) to an extent sufficient to discern cleavage products above the background of RNAs produced by random degradation of the target RNA. Production of cleavage products from 1-5% of the target RNA is sufficient to detect above the background for most methods of detection.

[0156] In one embodiment, the invention features a composition comprising a siNA molecule of the invention, which can be chemically-modified, in a pharmaceutically acceptable carrier or diluent. In another embodiment, the invention features a pharmaceutical composition comprising siNA molecules of the invention, which can be chemically-modified, targeting one or more genes in a pharmaceutically acceptable carrier or diluent. In another embodiment, the invention features a method for diagnosing a disease or condition in a subject comprising administering to the subject a composition of the invention under conditions suitable for the diagnosis of the disease or condition in the subject. In another embodiment, the invention features a method for treating or preventing a disease or condition in a subject, comprising administering to the subject a composition of the invention under conditions suitable for the treatment or prevention of the disease or condition in the subject, alone or in conjunction with one or more other therapeutic compounds. In yet another embodiment, the invention features a method for treating or preventing cancer, inflammatory, autoimmune, neuroligic, ocular, respiratory, allergic, and/or proliferative diseases, disorders and conditions in a subject or organism comprising administering to the subject a composition of the invention under conditions suitable for the treatment or prevention of cancer, inflammatory, autoimmune, neuroligic, ocular, respiratory, allergic, and/or proliferative diseases, disorders and conditions in the subject or organism.

[0157] In another embodiment, the invention features a method for validating a MAP kinase gene target, comprising: (a) synthesizing a siNA molecule of the invention, which can be chemically-modified, wherein one of the siNA strands includes a sequence complementary to RNA of a MAP kinase target gene; (b) introducing the siNA molecule into a cell, tissue, subject, or organism under conditions suitable for modulating expression of the MAP kinase target gene in the cell, tissue, subject, or organism; and (c) determining the function of the gene by assaying for any phenotypic change in the cell, tissue, subject, or organism.

[0158] In another embodiment, the invention features a method for validating a MAP kinase target comprising: (a) synthesizing a siNA molecule of the invention, which can be chemically-modified, wherein one of the siNA strands includes a sequence complementary to RNA of a MAP kinase target gene; (b) introducing the siNA molecule into a biological system under conditions suitable for modulating expression of the MAP kinase target gene in the biological system; and (c) determining the function of the gene by assaying for any phenotypic change in the biological system.

[0159] By “biological system” is meant, material, in a purified or unpurified form, from biological sources, including but not limited to human or animal, wherein the system comprises the components required for RNAi activity. The term “biological system” includes, for example, a cell, tissue, subject, or organism, or extract thereof. The term biological system also includes reconstituted RNAi systems that can be used in an in vitro setting.

[0160] By “phenotypic change” is meant any detectable change to a cell that occurs in response to contact or treatment with a nucleic acid molecule of the invention (e.g., siNA). Such detectable changes include, but are not limited to, changes in shape, size, proliferation, motility, protein expression or RNA expression or other physical or chemical changes as can be assayed by methods known in the art. The detectable change can also include expression of reporter genes/molecules such as Green Florescent Protein (GFP) or various tags that are used to identify an expressed protein or any other cellular component that can be assayed.

[0161] In one embodiment, the invention features a kit containing a siNA molecule of the invention, which can be chemically-modified, that can be used to modulate the expression of a MAP kinase target gene in a biological system, including, for example, in a cell, tissue, subject, or organism. In another embodiment, the invention features a kit containing more than one siNA molecule of the invention, which can be chemically-modified, that can be used to modulate the expression of more than one MAP kinase target gene in a biological system, including, for example, in a cell, tissue, subject, or organism.

[0162] In one embodiment, the invention features a cell containing one or more siNA molecules of the invention, which can be chemically-modified. In another embodiment, the cell containing a siNA molecule of the invention is a mammalian cell. In yet another embodiment, the cell containing a siNA molecule of the invention is a human cell.

[0163] In one embodiment, the synthesis of a siNA molecule of the invention, which can be chemically-modified, comprises: (a) synthesis of two complementary strands of the siNA molecule; (b) annealing the two complementary strands together under conditions suitable to obtain a double-stranded siNA molecule. In another embodiment, synthesis of the two complementary strands of the siNA molecule is by solid phase oligonucleotide synthesis. In yet another embodiment, synthesis of the two complementary strands of the siNA molecule is by solid phase tandem oligonucleotide synthesis.

[0164] In one embodiment, the invention features a method for synthesizing a siNA duplex molecule comprising: (a) synthesizing a first oligonucleotide sequence strand of the siNA molecule, wherein the first oligonucleotide sequence strand comprises a cleavable linker molecule that can be used as a scaffold for the synthesis of the second oligonucleotide sequence strand of the siNA; (b) synthesizing the second oligonucleotide sequence strand of siNA on the scaffold of the first oligonucleotide sequence strand, wherein the second oligonucleotide sequence strand further comprises a chemical moiety than can be used to purify the siNA duplex; (c) cleaving the linker molecule of (a) under conditions suitable for the two siNA oligonucleotide strands to hybridize and form a stable duplex; and (d) purifying the siNA duplex utilizing the chemical moiety of the second oligonucleotide sequence strand. In one embodiment, cleavage of the linker molecule in (c) above takes place during deprotection of the oligonucleotide, for example, under hydrolysis conditions using an alkylamine base such as methylamine. In one embodiment, the method of synthesis comprises solid phase synthesis on a solid support such as controlled pore glass (CPG) or polystyrene, wherein the first sequence of (a) is synthesized on a cleavable linker, such as a succinyl linker, using the solid support as a scaffold. The cleavable linker in (a) used as a scaffold for synthesizing the second strand can comprise similar reactivity as the solid support derivatized linker, such that cleavage of the solid support derivatized linker and the cleavable linker of (a) takes place concomitantly. In another embodiment, the chemical moiety of (b) that can be used to isolate the attached oligonucleotide sequence comprises a trityl group, for example a dimethoxytrityl group, which can be employed in a trityl-on synthesis strategy as described herein. In yet another embodiment, the chemical moiety, such as a dimethoxytrityl group, is removed during purification, for example, using acidic conditions.

[0165] In a further embodiment, the method for siNA synthesis is a solution phase synthesis or hybrid phase synthesis wherein both strands of the siNA duplex are synthesized in tandem using a cleavable linker attached to the first sequence which acts a scaffold for synthesis of the second sequence. Cleavage of the linker under conditions suitable for hybridization of the separate siNA sequence strands results in formation of the double-stranded siNA molecule.

[0166] In another embodiment, the invention features a method for synthesizing a siNA duplex molecule comprising: (a) synthesizing one oligonucleotide sequence strand of the siNA molecule, wherein the sequence comprises a cleavable linker molecule that can be used as a scaffold for the synthesis of another oligonucleotide sequence; (b) synthesizing a second oligonucleotide sequence having complementarity to the first sequence strand on the scaffold of (a), wherein the second sequence comprises the other strand of the double-stranded siNA molecule and wherein the second sequence further comprises a chemical moiety than can be used to isolate the attached oligonucleotide sequence; (c) purifying the product of (b) utilizing the chemical moiety of the second oligonucleotide sequence strand under conditions suitable for isolating the full-length sequence comprising both siNA oligonucleotide strands connected by the cleavable linker and under conditions suitable for the two siNA oligonucleotide strands to hybridize and form a stable duplex. In one embodiment, cleavage of the linker molecule in (c) above takes place during deprotection of the oligonucleotide, for example, under hydrolysis conditions. In another embodiment, cleavage of the linker molecule in (c) above takes place after deprotection of the oligonucleotide. In another embodiment, the method of synthesis comprises solid phase synthesis on a solid support such as controlled pore glass (CPG) or polystyrene, wherein the first sequence of (a) is synthesized on a cleavable linker, such as a succinyl linker, using the solid support as a scaffold. The cleavable linker in (a) used as a scaffold for synthesizing the second strand can comprise similar reactivity or differing reactivity as the solid support derivatized linker, such that cleavage of the solid support derivatized linker and the cleavable linker of (a) takes place either concomitantly or sequentially. In one embodiment, the chemical moiety of (b) that can be used to isolate the attached oligonucleotide sequence comprises a trityl group, for example a dimethoxytrityl group.

[0167] In another embodiment, the invention features a method for making a double-stranded siNA molecule in a single synthetic process comprising: (a) synthesizing an oligonucleotide having a first and a second sequence, wherein the first sequence is complementary to the second sequence, and the first oligonucleotide sequence is linked to the second sequence via a cleavable linker, and wherein a terminal 5′-protecting group, for example, a 5′-O-dimethoxytrityl group (5′-O-DMT) remains on the oligonucleotide having the second sequence; (b) deprotecting the oligonucleotide whereby the deprotection results in the cleavage of the linker joining the two oligonucleotide sequences; and (c) purifying the product of (b) under conditions suitable for isolating the double-stranded siNA molecule, for example using a trityl-on synthesis strategy as described herein.

[0168] In another embodiment, the method of synthesis of siNA molecules of the invention comprises the teachings of Scaringe et al., U.S. Pat. Nos. 5,889,136; 6,008,400; and 6,111,086, incorporated by reference herein in their entirety.

[0169] In one embodiment, the invention features siNA constructs that mediate RNAi against MAP kinase, wherein the siNA construct comprises one or more chemical modifications, for example, one or more chemical modifications having any of Formulae I-VII or any combination thereof that increases the nuclease resistance of the siNA construct.

[0170] In another embodiment, the invention features a method for generating siNA molecules with increased nuclease resistance comprising (a) introducing nucleotides having any of Formula I-VII or any combination thereof into a siNA molecule, and (b) assaying the siNA molecule of step (a) under conditions suitable for isolating siNA molecules having increased nuclease resistance.

[0171] In another embodiment, the invention features a method for generating siNA molecules with improved toxicologic profiles (e.g., have attenuated or no immunstimulatory properties) comprising (a) introducing nucleotides having any of Formula I-VII (e.g., siNA motifs referred to in Table IV) or any combination thereof into a siNA molecule, and (b) assaying the siNA molecule of step (a) under conditions suitable for isolating siNA molecules having improved toxicologic profiles.

[0172] In another embodiment, the invention features a method for generating siNA molecules that do not stimulate an interferon response (e.g., no interferon response or attenuated interferon response) in a cell, subject, or organism, comprising (a) introducing nucleotides having any of Formula I-VII (e.g., siNA motifs referred to in Table IV) or any combination thereof into a siNA molecule, and (b) assaying the siNA molecule of step (a) under conditions suitable for isolating siNA molecules that do not stimulate an interferon response.

[0173] By “improved toxicologic profile”, is meant that the chemically modified siNA construct exhibits decreased toxicity in a cell, subject, or organism compared to an unmodified siNA or siNA molecule having fewer modifications or modifications that are less effective in imparting improved toxicology. In a non-limiting example, siNA molecules with improved toxicologic profiles are associated with a decreased or attenuated immunostimulatory response in a cell, subject, or organism compared to an unmodified siNA or siNA molecule having fewer modifications or modifications that are less effective in imparting improved toxicology. In one embodiment, a siNA molecule with an improved toxicological profile comprises no ribonucleotides. In one embodiment, a siNA molecule with an improved toxicological profile comprises less than 5 ribonucleotides (e.g., 1, 2, 3, or 4 ribonucleotides). In one embodiment, a siNA molecule with an improved toxicological profile comprises Stab 7, Stab 8, Stab 11, Stab 12, Stab 13, Stab 16, Stab 17, Stab 18, Stab 19, Stab 20, Stab 23, Stab 24, Stab 25, Stab 26, Stab 27, Stab 28, Stab 29, Stab 30, Stab 31, Stab 32 or any combination thereof (see Table IV). In one embodiment, the level of immunostimulatory response associated with a given siNA molecule can be measured as is known in the art, for example by determining the level of PKR/interferon response, proliferation, B-cell activation, and/or cytokine production in assays to quantitate the immunostimulatory response of particular siNA molecules (see, for example, Leifer et al., 2003, J Immunother. 26, 313-9; and U.S. Pat. No. 5,968,909, incorporated in its entirety by reference).

[0174] In one embodiment, the invention features siNA constructs that mediate RNAi against MAP kinase, wherein the siNA construct comprises one or more chemical modifications described herein that modulates the binding affinity between the sense and antisense strands of the siNA construct.

[0175] In another embodiment, the invention features a method for generating siNA molecules with increased binding affinity between the sense and antisense strands of the siNA molecule comprising (a) introducing nucleotides having any of Formula I-VII or any combination thereof into a siNA molecule, and (b) assaying the siNA molecule of step (a) under conditions suitable for isolating siNA molecules having increased binding affinity between the sense and antisense strands of the siNA molecule.

[0176] In one embodiment, the invention features siNA constructs that mediate RNAi against MAP kinase, wherein the siNA construct comprises one or more chemical modifications described herein that modulates the binding affinity between the antisense strand of the siNA construct and a complementary target RNA sequence within a cell.

[0177] In one embodiment, the invention features siNA constructs that mediate RNAi against MAP kinase, wherein the siNA construct comprises one or more chemical modifications described herein that modulates the binding affinity between the antisense strand of the siNA construct and a complementary target DNA sequence within a cell.

[0178] In another embodiment, the invention features a method for generating siNA molecules with increased binding affinity between the antisense strand of the siNA molecule and a complementary target RNA sequence comprising (a) introducing nucleotides having any of Formula I-VII or any combination thereof into a siNA molecule, and (b) assaying the siNA molecule of step (a) under conditions suitable for isolating siNA molecules having increased binding affinity between the antisense strand of the siNA molecule and a complementary target RNA sequence.

[0179] In another embodiment, the invention features a method for generating siNA molecules with increased binding affinity between the antisense strand of the siNA molecule and a complementary target DNA sequence comprising (a) introducing nucleotides having any of Formula I-VII or any combination thereof into a siNA molecule, and (b) assaying the siNA molecule of step (a) under conditions suitable for isolating siNA molecules having increased binding affinity between the antisense strand of the siNA molecule and a complementary target DNA sequence.

[0180] In one embodiment, the invention features siNA constructs that mediate RNAi against MAP kinase, wherein the siNA construct comprises one or more chemical modifications described herein that modulate the polymerase activity of a cellular polymerase capable of generating additional endogenous siNA molecules having sequence homology to the chemically-modified siNA construct.

[0181] In another embodiment, the invention features a method for generating siNA molecules capable of mediating increased polymerase activity of a cellular polymerase capable of generating additional endogenous siNA molecules having sequence homology to a chemically-modified siNA molecule comprising (a) introducing nucleotides having any of Formula I-VII or any combination thereof into a siNA molecule, and (b) assaying the siNA molecule of step (a) under conditions suitable for isolating siNA molecules capable of mediating increased polymerase activity of a cellular polymerase capable of generating additional endogenous siNA molecules having sequence homology to the chemically-modified siNA molecule.

[0182] In one embodiment, the invention features chemically-modified siNA constructs that mediate RNAi against MAP kinase in a cell, wherein the chemical modifications do not significantly effect the interaction of siNA with a target RNA molecule, DNA molecule and/or proteins or other factors that are essential for RNAi in a manner that would decrease the efficacy of RNAi mediated by such siNA constructs.

[0183] In another embodiment, the invention features a method for generating siNA molecules with improved RNAi activity against MAP kinase comprising (a) introducing nucleotides having any of Formula I-VII or any combination thereof into a siNA molecule, and (b) assaying the siNA molecule of step (a) under conditions suitable for isolating siNA molecules having improved RNAi activity.

[0184] In yet another embodiment, the invention features a method for generating siNA molecules with improved RNAi activity against MAP kinase target RNA comprising (a) introducing nucleotides having any of Formula I-VII or any combination thereof into a siNA molecule, and (b) assaying the siNA molecule of step (a) under conditions suitable for isolating siNA molecules having improved RNAi activity against the target RNA.

[0185] In yet another embodiment, the invention features a method for generating siNA molecules with improved RNAi activity against MAP kinase target DNA comprising (a) introducing nucleotides having any of Formula I-VII or any combination thereof into a siNA molecule, and (b) assaying the siNA molecule of step (a) under conditions suitable for isolating siNA molecules having improved RNAi activity against the target DNA.

[0186] In one embodiment, the invention features siNA constructs that mediate RNAi against MAP kinase, wherein the siNA construct comprises one or more chemical modifications described herein that modulates the cellular uptake of the siNA construct.

[0187] In another embodiment, the invention features a method for generating siNA molecules against MAP kinase with improved cellular uptake comprising (a) introducing nucleotides having any of Formula I-VII or any combination thereof into a siNA molecule, and (b) assaying the siNA molecule of step (a) under conditions suitable for isolating siNA molecules having improved cellular uptake.

[0188] In one embodiment, the invention features siNA constructs that mediate RNAi against MAP kinase, wherein the siNA construct comprises one or more chemical modifications described herein that increases the bioavailability of the siNA construct, for example, by attaching polymeric conjugates such as polyethyleneglycol or equivalent conjugates that improve the pharmacokinetics of the siNA construct, or by attaching conjugates that target specific tissue types or cell types in vivo. Non-limiting examples of such conjugates are described in Vargeese et al., U.S. Ser. No. 10/201,394 incorporated by reference herein.

[0189] In one embodiment, the invention features a method for generating siNA molecules of the invention with improved bioavailability comprising (a) introducing a conjugate into the structure of a siNA molecule, and (b) assaying the siNA molecule of step (a) under conditions suitable for isolating siNA molecules having improved bioavailability. Such conjugates can include ligands for cellular receptors, such as peptides derived from naturally occurring protein ligands; protein localization sequences, including cellular ZIP code sequences; antibodies; nucleic acid aptamers; vitamins and other co-factors, such as folate and N-acetylgalactosamine; polymers, such as polyethyleneglycol (PEG); phospholipids; cholesterol; polyamines, such as spermine or spermidine; and others.

[0190] In one embodiment, the invention features a double stranded short interfering nucleic acid (siNA) molecule that comprises a first nucleotide sequence complementary to a target RNA sequence or a portion thereof, and a second sequence having complementarity to said first sequence, wherein said second sequence is chemically modified in a manner that it can no longer act as a guide sequence for efficiently mediating RNA interference and/or be recognized by cellular proteins that facilitate RNAi.

[0191] In one embodiment, the invention features a double stranded short interfering nucleic acid (siNA) molecule that comprises a first nucleotide sequence complementary to a target RNA sequence or a portion thereof, and a second sequence having complementarity to said first sequence, wherein the second sequence is designed or modified in a manner that prevents its entry into the RNAi pathway as a guide sequence or as a sequence that is complementary to a target nucleic acid (e.g., RNA) sequence. Such design or modifications are expected to enhance the activity of siNA and/or improve the specificity of siNA molecules of the invention. These modifications are also expected to minimize any off-target effects and/or associated toxicity.

[0192] In one embodiment, the invention features a double stranded short interfering nucleic acid (siNA) molecule that comprises a first nucleotide sequence complementary to a target RNA sequence or a portion thereof, and a second sequence having complementarity to said first sequence, wherein said second sequence is incapable of acting as a guide sequence for mediating RNA interference.

[0193] In one embodiment, the invention features a double stranded short interfering nucleic acid (siNA) molecule that comprises a first nucleotide sequence complementary to a target RNA sequence or a portion thereof, and a second sequence having complementarity to said first sequence, wherein said second sequence does not have a terminal 5′-hydroxyl (5′-OH) or 5′-phosphate group.

[0194] In one embodiment, the invention features a double stranded short interfering nucleic acid (siNA) molecule that comprises a first nucleotide sequence complementary to a target RNA sequence or a portion thereof, and a second sequence having complementarity to said first sequence, wherein said second sequence comprises a terminal cap moiety at the 5′-end of said second sequence. In one embodiment, the terminal cap moiety comprises an inverted abasic, inverted deoxy abasic, inverted nucleotide moiety, a group shown in FIG. 10, an alkyl or cycloalkyl group, a heterocycle, or any other group that prevents RNAi activity in which the second sequence serves as a guide sequence or template for RNAi.

[0195] In one embodiment, the invention features a double stranded short interfering nucleic acid (siNA) molecule that comprises a first nucleotide sequence complementary to a target RNA sequence or a portion thereof, and a second sequence having complementarity to said first sequence, wherein said second sequence comprises a terminal cap moiety at the 5′-end and 3′-end of said second sequence. In one embodiment, each terminal cap moiety individually comprises an inverted abasic, inverted deoxy abasic, inverted nucleotide moiety, a group shown in FIG. 10, an alkyl or cycloalkyl group, a heterocycle, or any other group that prevents RNAi activity in which the second sequence serves as a guide sequence or template for RNAi.

[0196] In one embodiment, the invention features a method for generating siNA molecules of the invention with improved specificity for down regulating or inhibiting the expression of a target nucleic acid (e.g., a DNA or RNA such as a gene or its corresponding RNA), comprising (a) introducing one or more chemical modifications into the structure of a siNA molecule, and (b) assaying the siNA molecule of step (a) under conditions suitable for isolating siNA molecules having improved specificity. In another embodiment, the chemical modification used to improve specificity comprises terminal cap modifications at the 5′-end, 3′-end, or both 5′ and 3′-ends of the siNA molecule. The terminal cap modifications can comprise, for example, structures shown in FIG. 10 (e.g. inverted deoxyabasic moieties) or any other chemical modification that renders a portion of the siNA molecule (e.g. the sense strand) incapable of mediating RNA interference against an off target nucleic acid sequence. In a non-limiting example, a siNA molecule is designed such that only the antisense sequence of the siNA molecule can serve as a guide sequence for RISC mediated degradation of a corresponding target RNA sequence. This can be accomplished by rendering the sense sequence of the siNA inactive by introducing chemical modifications to the sense strand that preclude recognition of the sense strand as a guide sequence by RNAi machinery. In one embodiment, such chemical modifications comprise any chemical group at the 5′-end of the sense strand of the siNA, or any other group that serves to render the sense strand inactive as a guide sequence for mediating RNA interference. These modifications, for example, can result in a molecule where the 5′-end of the sense strand no longer has a free 5′-hydroxyl (5′-OH) or a free 5′-phosphate group (e.g., phosphate, diphosphate, triphosphate, cyclic phosphate etc.). Non-limiting examples of such siNA constructs are described herein, such as “Stab 9/10”, “Stab 7/8”, “Stab 7/19”, “Stab 17/22”, “Stab 23/24”, “Stab 24/25”, and “Stab 24/26” (e.g., any siNA having Stab 7, 9, 17, 23, or 24 sense strands) chemistries and variants thereof (see Table IV) wherein the 5′-end and 3′-end of the sense strand of the siNA do not comprise a hydroxyl group or phosphate group.

[0197] In one embodiment, the invention features a method for generating siNA molecules of the invention with improved specificity for down regulating or inhibiting the expression of a target nucleic acid (e.g., a DNA or RNA such as a gene or its corresponding RNA), comprising introducing one or more chemical modifications into the structure of a siNA molecule that prevent a strand or portion of the siNA molecule from acting as a template or guide sequence for RNAi activity. In one embodiment, the inactive strand or sense region of the siNA molecule is the sense strand or sense region of the siNA molecule, i.e. the strand or region of the siNA that does not have complementarity to the target nucleic acid sequence. In one embodiment, such chemical modifications comprise any chemical group at the 5′-end of the sense strand or region of the siNA that does not comprise a 5′-hydroxyl (5′-OH) or 5′-phosphate group, or any other group that serves to render the sense strand or sense region inactive as a guide sequence for mediating RNA interference. Non-limiting examples of such siNA constructs are described herein, such as “Stab 9/10”, “Stab 7/8”, “Stab 7/19”, “Stab 17/22”, “Stab 23/24”, “Stab 24/25”, and “Stab 24/26” (e.g., any siNA having Stab 7, 9, 17, 23, or 24 sense strands) chemistries and variants thereof (see Table IV) wherein the 5′-end and 3′-end of the sense strand of the siNA do not comprise a hydroxyl group or phosphate group.

[0198] In one embodiment, the invention features a method for screening siNA molecules that are active in mediating RNA interference against a target nucleic acid sequence comprising (a) generating a plurality of unmodified siNA molecules, (b) screening the siNA molecules of step (a) under conditions suitable for isolating siNA molecules that are active in mediating RNA interference against the target nucleic acid sequence, and (c) introducing chemical modifications (e.g. chemical modifications as described herein or as otherwise known in the art) into the active siNA molecules of (b). In one embodiment, the method further comprises re-screening the chemically modified siNA molecules of step (c) under conditions suitable for isolating chemically modified siNA molecules that are active in mediating RNA interference against the target nucleic acid sequence.

[0199] In one embodiment, the invention features a method for screening chemically modified siNA molecules that are active in mediating RNA interference against a target nucleic acid sequence comprising (a) generating a plurality of chemically modified siNA molecules (e.g. siNA molecules as described herein or as otherwise known in the art), and (b) screening the siNA molecules of step (a) under conditions suitable for isolating chemically modified siNA molecules that are active in mediating RNA interference against the target nucleic acid sequence.

[0200] The term “ligand” refers to any compound or molecule, such as a drug, peptide, hormone, or neurotransmitter, that is capable of interacting with another compound, such as a receptor, either directly or indirectly. The receptor that interacts with a ligand can be present on the surface of a cell or can alternately be an intercellular receptor. Interaction of the ligand with the receptor can result in a biochemical reaction, or can simply be a physical interaction or association.

[0201] In another embodiment, the invention features a method for generating siNA molecules of the invention with improved bioavailability comprising (a) introducing an excipient formulation to a siNA molecule, and (b) assaying the siNA molecule of step (a) under conditions suitable for isolating siNA molecules having improved bioavailability. Such excipients include polymers such as cyclodextrins, lipids, cationic lipids, polyamines, phospholipids, nanoparticles, receptors, ligands, and others.

[0202] In another embodiment, the invention features a method for generating siNA molecules of the invention with improved bioavailability comprising (a) introducing nucleotides having any of Formulae I-VII or any combination thereof into a siNA molecule, and (b) assaying the siNA molecule of step (a) under conditions suitable for isolating siNA molecules having improved bioavailability.

[0203] In another embodiment, polyethylene glycol (PEG) can be covalently attached to siNA compounds of the present invention. The attached PEG can be any molecular weight, preferably from about 2,000 to about 50,000 daltons (Da).

[0204] The present invention can be used alone or as a component of a kit having at least one of the reagents necessary to carry out the in vitro or in vivo introduction of RNA to test samples and/or subjects. For example, preferred components of the kit include a siNA molecule of the invention and a vehicle that promotes introduction of the siNA into cells of interest as described herein (e.g., using lipids and other methods of transfection known in the art, see for example Beigelman et al, U.S. Pat. No. 6,395,713). The kit can be used for target validation, such as in determining gene function and/or activity, or in drug optimization, and in drug discovery (see for example Usman et al., U.S. Ser. No. 60/402,996). Such a kit can also include instructions to allow a user of the kit to practice the invention.

[0205] The term “short interfering nucleic acid”, “siNA”, “short interfering RNA”, “siRNA”, “short interfering nucleic acid molecule”, “short interfering oligonucleotide molecule”, or “chemically-modified short interfering nucleic acid molecule” as used herein refers to any nucleic acid molecule capable of inhibiting or down regulating gene expression or viral replication, for example by mediating RNA interference “RNAi” or gene silencing in a sequence-specific manner; see for example Zamore et al., 2000, Cell, 101, 25-33; Bass, 2001, Nature, 411, 428-429; Elbashir et al., 2001, Nature, 411, 494-498; and Kreutzer et al., International PCT Publication No. WO 00/44895; Zernicka-Goetz et al., International PCT Publication No. WO 01/36646; Fire, International PCT Publication No. WO 99/32619; Plaetinck et al., International PCT Publication No. WO 00/01846; Mello and Fire, International PCT Publication No. WO 01/29058; Deschamps-Depaillette, International PCT Publication No. WO 99/07409; and Li et al., International PCT Publication No. WO 00/44914; Allshire, 2002, Science, 297, 1818-1819; Volpe et al., 2002, Science, 297, 1833-1837; Jenuwein, 2002, Science, 297, 2215-2218; and Hall et al., 2002, Science, 297, 2232-2237; Hutvagner and Zamore, 2002, Science, 297, 2056-60; McManus et al., 2002, RNA, 8, 842-850; Reinhart et al., 2002, Gene &Dev., 16, 1616-1626; and Reinhart & Bartel, 2002, Science, 297, 1831). Non limiting examples of siNA molecules of the invention are shown in FIGS. 4-6, and Tables II and III herein. For example the siNA can be a double-stranded polynucleotide molecule comprising self-complementary sense and antisense regions, wherein the antisense region comprises nucleotide sequence that is complementary to nucleotide sequence in a target nucleic acid molecule or a portion thereof and the sense region having nucleotide sequence corresponding to the target nucleic acid sequence or a portion thereof. The siNA can be assembled from two separate oligonucleotides, where one strand is the sense strand and the other is the antisense strand, wherein the antisense and sense strands are self-complementary (i.e. each strand comprises nucleotide sequence that is complementary to nucleotide sequence in the other strand; such as where the antisense strand and sense strand form a duplex or double stranded structure, for example wherein the double stranded region is about 15 to about 30, e.g., about 15, 16, 17, 18, 19, 20, 21, 22, 23, 24, 25, 26, 27, 28, 29 or 30 base pairs; the antisense strand comprises nucleotide sequence that is complementary to nucleotide sequence in a target nucleic acid molecule or a portion thereof and the sense strand comprises nucleotide sequence corresponding to the target nucleic acid sequence or a portion thereof (e.g., about 15 to about 25 or more nucleotides of the siNA molecule are complementary to the target nucleic acid or a portion thereof). Alternatively, the siNA is assembled from a single oligonucleotide, where the self-complementary sense and antisense regions of the siNA are linked by means of a nucleic acid based or non-nucleic acid-based linker(s). The siNA can be a polynucleotide with a duplex, asymmetric duplex, hairpin or asymmetric hairpin secondary structure, having self-complementary sense and antisense regions, wherein the antisense region comprises nucleotide sequence that is complementary to nucleotide sequence in a separate target nucleic acid molecule or a portion thereof and the sense region having nucleotide sequence corresponding to the target nucleic acid sequence or a portion thereof. The siNA can be a circular single-stranded polynucleotide having two or more loop structures and a stem comprising self-complementary sense and antisense regions, wherein the antisense region comprises nucleotide sequence that is complementary to nucleotide sequence in a target nucleic acid molecule or a portion thereof and the sense region having nucleotide sequence corresponding to the target nucleic acid sequence or a portion thereof, and wherein the circular polynucleotide can be processed either in vivo or in vitro to generate an active siNA molecule capable of mediating RNAi. The siNA can also comprise a single stranded polynucleotide having nucleotide sequence complementary to nucleotide sequence in a target nucleic acid molecule or a portion thereof (for example, where such siNA molecule does not require the presence within the siNA molecule of nucleotide sequence corresponding to the target nucleic acid sequence or a portion thereof), wherein the single stranded polynucleotide can further comprise a terminal phosphate group, such as a 5′-phosphate (see for example Martinez et al., 2002, Cell., 110, 563-574 and Schwarz et al., 2002, Molecular Cell, 10, 537-568), or 5′,3′-diphosphate. In certain embodiments, the siNA molecule of the invention comprises separate sense and antisense sequences or regions, wherein the sense and antisense regions are covalently linked by nucleotide or non-nucleotide linkers molecules as is known in the art, or are alternately non-covalently linked by ionic interactions, hydrogen bonding, van der waals interactions, hydrophobic interactions, and/or stacking interactions. In certain embodiments, the siNA molecules of the invention comprise nucleotide sequence that is complementary to nucleotide sequence of a target gene. In another embodiment, the siNA molecule of the invention interacts with nucleotide sequence of a target gene in a manner that causes inhibition of expression of the target gene. As used herein, siNA molecules need not be limited to those molecules containing only RNA, but further encompasses chemically-modified nucleotides and non-nucleotides. In certain embodiments, the short interfering nucleic acid molecules of the invention lack 2′-hydroxy (2′-OH) containing nucleotides. Applicant describes in certain embodiments short interfering nucleic acids that do not require the presence of nucleotides having a 2′-hydroxy group for mediating RNAi and as such, short interfering nucleic acid molecules of the invention optionally do not include any ribonucleotides (e.g., nucleotides having a 2′-OH group). Such siNA molecules that do not require the presence of ribonucleotides within the siNA molecule to support RNAi can however have an attached linker or linkers or other attached or associated groups, moieties, or chains containing one or more nucleotides with 2′-OH groups. Optionally, siNA molecules can comprise ribonucleotides at about 5, 10, 20, 30, 40, or 50% of the nucleotide positions. The modified short interfering nucleic acid molecules of the invention can also be referred to as short interfering modified oligonucleotides “siMON.” As used herein, the term siNA is meant to be equivalent to other terms used to describe nucleic acid molecules that are capable of mediating sequence specific RNAi, for example short interfering RNA (siRNA), double-stranded RNA (dsRNA), micro-RNA (mRNA), short hairpin RNA (shRNA), short interfering oligonucleotide, short interfering nucleic acid, short interfering modified oligonucleotide, chemically-modified siRNA, post-transcriptional gene silencing RNA (ptgsRNA), and others. In addition, as used herein, the term RNAi is meant to be equivalent to other terms used to describe sequence specific RNA interference, such as post transcriptional gene silencing, translational inhibition, or epigenetics. For example, siNA molecules of the invention can be used to epigenetically silence genes at both the post-transcriptional level or the pre-transcriptional level. In a non-limiting example, epigenetic regulation of gene expression by siNA molecules of the invention can result from siNA mediated modification of chromatin structure or methylation pattern to alter gene expression (see, for example, Verdel et al., 2004, Science, 303, 672-676; Pal-Bhadra et al., 2004, Science, 303, 669-672; Allshire, 2002, Science, 297, 1818-1819; Volpe et al., 2002, Science, 297, 1833-1837; Jenuwein, 2002, Science, 297, 2215-2218; and Hall et al., 2002, Science, 297, 2232-2237).

[0206] In one embodiment, a siNA molecule of the invention is a duplex forming oligonucleotide “DFO”, (see for example FIGS. 14-15 and Vaish et al., U.S. Ser. No. 10/727,780 filed Dec. 3, 2003 and International PCT Application No. US04/16390, filed May 24, 2004).

[0207] In one embodiment, a siNA molecule of the invention is a multifunctional siNA, (see for example FIGS. 16-21 and Jadhav et al., U.S. Ser. No. 60/543,480 filed Feb. 10, 2004 and International PCT Application No. US04/16390, filed May 24, 2004). The multifunctional siNA of the invention can comprise sequence targeting, for example, two regions of MAP kinase RNA (see for example target sequences in Tables II and III).

[0208] By “asymmetric hairpin” as used herein is meant a linear siNA molecule comprising an antisense region, a loop portion that can comprise nucleotides or non-nucleotides, and a sense region that comprises fewer nucleotides than the antisense region to the extent that the sense region has enough complementary nucleotides to base pair with the antisense region and form a duplex with loop. For example, an asymmetric hairpin siNA molecule of the invention can comprise an antisense region having length sufficient to mediate RNAi in a cell or in vitro system (e.g. about 15 to about 30, or about 15, 16, 17, 18, 19, 20, 21, 22, 23, 24, 25, 26, 27, 28, 29, or 30 nucleotides) and a loop region comprising about 4 to about 12 (e.g., about 4, 5, 6, 7, 8, 9, 10, 11, or 12) nucleotides, and a sense region having about 3 to about 25 (e.g., about 3, 4, 5, 6, 7, 8, 9, 10, 11, 12, 13, 14, 15, 16, 17, 18, 19, 20, 21, 22, 23, 24, or 25) nucleotides that are complementary to the antisense region. The asymmetric hairpin siNA molecule can also comprise a 5′-terminal phosphate group that can be chemically modified. The loop portion of the asymmetric hairpin siNA molecule can comprise nucleotides, non-nucleotides, linker molecules, or conjugate molecules as described herein.

[0209] By “asymmetric duplex” as used herein is meant a siNA molecule having two separate strands comprising a sense region and an antisense region, wherein the sense region comprises fewer nucleotides than the antisense region to the extent that the sense region has enough complementary nucleotides to base pair with the antisense region and form a duplex. For example, an asymmetric duplex siNA molecule of the invention can comprise an antisense region having length sufficient to mediate RNAi in a cell or in vitro system (e.g. about 15 to about 30, or about 15, 16, 17, 18, 19, 20, 21, 22, 23, 24, 25, 26, 27, 28, 29, or 30 nucleotides) and a sense region having about 3 to about 25 (e.g., about 3, 4, 5, 6, 7, 8, 9, 10, 11, 12, 13, 14, 15, 16, 17, 18, 19, 20, 21, 22, 23, 24, or 25) nucleotides that are complementary to the antisense region.

[0210] By “modulate” is meant that the expression of the gene, or level of RNA molecule or equivalent RNA molecules encoding one or more proteins or protein subunits, or activity of one or more proteins or protein subunits is up regulated or down regulated, such that expression, level, or activity is greater than or less than that observed in the absence of the modulator. For example, the term “modulate” can mean “inhibit,” but the use of the word “modulate” is not limited to this definition.

[0211] By “inhibit”, “down-regulate”, or “reduce”, it is meant that the expression of the gene, or level of RNA molecules or equivalent RNA molecules encoding one or more proteins or protein subunits, or activity of one or more proteins or protein subunits, is reduced below that observed in the absence of the nucleic acid molecules (e.g., siNA) of the invention. In one embodiment, inhibition, down-regulation or reduction with an siNA molecule is below that level observed in the presence of an inactive or attenuated molecule. In another embodiment, inhibition, down-regulation, or reduction with siNA molecules is below that level observed in the presence of, for example, an siNA molecule with scrambled sequence or with mismatches. In another embodiment, inhibition, down-regulation, or reduction of gene expression with a nucleic acid molecule of the instant invention is greater in the presence of the nucleic acid molecule than in its absence. In one embodiment, inhibition, down regulation, or reduction of gene expression is associated with post transcriptional silencing, such as RNAi mediated cleavage of a target nucleic acid molecule (e.g. RNA) or inhibition of translation. In one embodiment, inhibition, down regulation, or reduction of gene expression is associated with pretranscriptional silencing.

[0212] By “gene”, or “target gene”, is meant a nucleic acid that encodes an RNA, for example, nucleic acid sequences including, but not limited to, structural genes encoding a polypeptide. A gene or target gene can also encode a functional RNA (fRNA) or non-coding RNA (ncRNA), such as small temporal RNA (stRNA), micro RNA (mRNA), small nuclear RNA (snRNA), short interfering RNA (siRNA), small nucleolar RNA (snRNA), ribosomal RNA (rRNA), transfer RNA (tRNA) and precursor RNAs thereof. Such non-coding RNAs can serve as target nucleic acid molecules for siNA mediated RNA interference in modulating the activity of fRNA or ncRNA involved in functional or regulatory cellular processes. Abberant fRNA or ncRNA activity leading to disease can therefore be modulated by siNA molecules of the invention. siNA molecules targeting fRNA and ncRNA can also be used to manipulate or alter the genotype or phenotype of a subject, organism or cell, by intervening in cellular processes such as genetic imprinting, transcription, translation, or nucleic acid processing (e.g., transamination, methylation etc.). The target gene can be a gene derived from a cell, an endogenous gene, a transgene, or exogenous genes such as genes of a pathogen, for example a virus, which is present in the cell after infection thereof. The cell containing the target gene can be derived from or contained in any organism, for example a plant, animal, protozoan, virus, bacterium, or fungus. Non-limiting examples of plants include monocots, dicots, or gymnosperms. Non-limiting examples of animals include vertebrates or invertebrates. Non-limiting examples of fungi include molds or yeasts. For a review, see for example Snyder and Gerstein, 2003, Science, 300, 258-260.

[0213] By “non-canonical base pair” is meant any non-Watson Crick base pair, such as mismatches and/or wobble base pairs, including flipped mismatches, single hydrogen bond mismatches, trans-type mismatches, triple base interactions, and quadruple base interactions. Non-limiting examples of such non-canonical base pairs include, but are not limited to, AC reverse Hoogsteen, AC wobble, AU reverse Hoogsteen, GU wobble, AA N7 amino, CC 2-carbonyl-amino(H1)-N-3-amino(H2), GA sheared, UC 4-carbonyl-amino, UU imino-carbonyl, AC reverse wobble, AU Hoogsteen, AU reverse Watson Crick, CG reverse Watson Crick, GC N3-amino-amino N3, AA N1-amino symmetric, AA N7-amino symmetric, GA N7-N1 amino-carbonyl, GA+ carbonyl-amino N7-N1, GG N1-carbonyl symmetric, GG N3-amino symmetric, CC carbonyl-amino symmetric, CC N3-amino symmetric, UU 2-carbonyl-imino symmetric, UU 4-carbonyl-imino symmetric, AA amino-N3, AA N1-amino, AC amino 2-carbonyl, AC N3-amino, AC N7-amino, AU amino-4-carbonyl, AU N1-imino, AU N3-imino, AU N7-imino, CC carbonyl-amino, GA amino-N1, GA amino-N7, GA carbonyl-amino, GA N3-amino, GC amino-N3, GC carbonyl-amino, GC N3-amino, GC N7-amino, GG amino-N7, GG carbonyl-imino, GG N7-amino, GU amino-2-carbonyl, GU carbonyl-imino, GU imino-2-carbonyl, GU N7-imino, psiU imino-2-carbonyl, UC 4-carbonyl-amino, UC imino-carbonyl, UU imino-4-carbonyl, AC C2—H—N3, GA carbonyl-C2-H, UU imino-4-carbonyl 2 carbonyl-C5-H, AC amino(A) N3(C)-carbonyl, GC imino amino-carbonyl, Gpsi imino-2-carbonyl amino-2-carbonyl, and GU imino amino-2-carbonyl base pairs.

[0214] By “MAP kinase” as used herein is meant, any mitogen activated protein kinase (MAP kinase) protein, peptide, or polypeptide having any MAP kinase activity, such as encoded by MAP kinase Genbank Accession Nos. shown in Table I or any other MAP kinase transcript derived from a MAP kinase gene, e.g., c-JUN, ERK1, ERK2, JNK1, JNK2, and/or p38. The term MAP kinase also refers to nucleic acid sequences encoding any MAP kinase protein (e.g., c-JUN, JNK1, JNK2, p38, ERK1, or ERK2), peptide, or polypeptide having MAP kinase activity. The term “MAP kinase” is also meant to include other MAP kinase encoding sequence, such as other MAP kinase (e.g., c-JUN, JNK1, JNK2, p38, ERK1, or ERK2) isoforms, mutant MAP kinase genes, splice variants of MAP kinase genes, and MAP kinase gene polymorphisms.

[0215] By “homologous sequence” is meant, a nucleotide sequence that is shared by one or more polynucleotide sequences, such as genes, gene transcripts and/or non-coding polynucleotides. For example, a homologous sequence can be a nucleotide sequence that is shared by two or more genes encoding related but different proteins, such as different members of a gene family, different protein epitopes, different protein isoforms or completely divergent genes, such as a cytokine and its corresponding receptors. A homologous sequence can be a nucleotide sequence that is shared by two or more non-coding polynucleotides, such as noncoding DNA or RNA, regulatory sequences, introns, and sites of transcriptional control or regulation. Homologous sequences can also include conserved sequence regions shared by more than one polynucleotide sequence. Homology does not need to be perfect homology (e.g., 100%), as partially homologous sequences are also contemplated by the instant invention (e.g., 99%, 98%, 97%, 96%, 95%, 94%, 93%, 92%, 91%, 90%, 89%, 88%, 87%, 86%, 85%, 84%, 83%, 82%, 81%, 80% etc.).

[0216] By “conserved sequence region” is meant, a nucleotide sequence of one or more regions in a polynucleotide does not vary significantly between generations or from one biological system, subject, or organism to another biological system, subject, or organism. The polynucleotide can include both coding and non-coding DNA and RNA.

[0217] By “sense region” is meant a nucleotide sequence of a siNA molecule having complementarity to an antisense region of the siNA molecule. In addition, the sense region of a siNA molecule can comprise a nucleic acid sequence having homology with a target nucleic acid sequence.

[0218] By “antisense region” is meant a nucleotide sequence of a siNA molecule having complementarity to a target nucleic acid sequence. In addition, the antisense region of a siNA molecule can optionally comprise a nucleic acid sequence having complementarity to a sense region of the siNA molecule.

[0219] By “target nucleic acid” is meant any nucleic acid sequence whose expression or activity is to be modulated. The target nucleic acid can be DNA or RNA.

[0220] By “complementarity” is meant that a nucleic acid can form hydrogen bond(s) with another nucleic acid sequence by either traditional Watson-Crick or other non-traditional types. In reference to the nucleic molecules of the present invention, the binding free energy for a nucleic acid molecule with its complementary sequence is sufficient to allow the relevant function of the nucleic acid to proceed, e.g., RNAi activity. Determination of binding free energies for nucleic acid molecules is well known in the art (see, e.g., Turner et al., 1987, CSH Symp. Quant. Biol. LII pp. 123-133; Frier et al., 1986, Proc. Nat. Acad. Sci. USA 83:9373-9377; Turner et al., 1987, J. Am. Chem. Soc. 109:3783-3785). A percent complementarity indicates the percentage of contiguous residues in a nucleic acid molecule that can form hydrogen bonds (e.g., Watson-Crick base pairing) with a second nucleic acid sequence (e.g., 5, 6, 7, 8, 9, or 10 nucleotides out of a total of 10 nucleotides in the first oligonucleotide being based paired to a second nucleic acid sequence having 10 nucleotides represents 50%, 60%, 70%, 80%, 90%, and 100% complementary respectively). “Perfectly complementary” means that all the contiguous residues of a nucleic acid sequence will hydrogen bond with the same number of contiguous residues in a second nucleic acid sequence. In one embodiment, a siNA molecule of the invention comprises about 15 to about 30 or more (e.g., about 15, 16, 17, 18, 19, 20, 21, 22, 23, 24, 25, 26, 27, 28, 29, or 30 or more) nucleotides that are complementary to one or more target nucleic acid molecules or a portion thereof.

[0221] In one embodiment, siNA molecules of the invention that down regulate or reduce MAP kinase gene expression are used for preventing or treating cancer, inflammatory, autoimmune, neuroligic, ocular, respiratory, allergic, and/or proliferative diseases, disorders, and/or conditions in a subject or organism.

[0222] In one embodiment, the siNA molecules of the invention are used to treat cancer, inflammatory, autoimmune, neuroligic, ocular, respiratory, allergic, and/or proliferative diseases, disorders, and/or conditions in a subject or organism.

[0223] By “proliferative disease” or “cancer” as used herein is meant, any disease, condition, trait, genotype or phenotype characterized by unregulated cell growth or replication as is known in the art; including AIDS related cancers such as Kaposi's sarcoma; breast cancers; bone cancers such as Osteosarcoma, Chondrosarcomas, Ewing's sarcoma, Fibrosarcomas, Giant cell tumors, Adamantinomas, and Chordomas; Brain cancers such as Meningiomas, Glioblastomas, Lower-Grade Astrocytomas, Oligodendrocytomas, Pituitary Tumors, Schwannomas, and Metastatic brain cancers; cancers of the head and neck including various lymphomas such as mantle cell lymphoma, non-Hodgkins lymphoma, adenoma, squamous cell carcinoma, laryngeal carcinoma, gallbladder and bile duct cancers, cancers of the retina such as retinoblastoma, cancers of the esophagus, gastric cancers, multiple myeloma, ovarian cancer, uterine cancer, thyroid cancer, testicular cancer, endometrial cancer, melanoma, colorectal cancer, lung cancer, bladder cancer, prostate cancer, lung cancer (including non-small cell lung carcinoma), pancreatic cancer, sarcomas, Wilms' tumor, cervical cancer, head and neck cancer, skin cancers, nasopharyngeal carcinoma, liposarcoma, epithelial carcinoma, renal cell carcinoma, gallbladder adeno carcinoma, parotid adenocarcinoma, endometrial sarcoma, multidrug resistant cancers; and proliferative diseases and conditions, such as neovascularization associated with tumor angiogenesis, macular degeneration (e.g., wet/dry AMD), corneal neovascularization, diabetic retinopathy, neovascular glaucoma, myopic degeneration and other proliferative diseases and conditions such as restenosis and polycystic kidney disease, and any other cancer or proliferative disease, condition, trait, genotype or phenotype that can respond to the modulation of disease related gene expression in a cell or tissue, alone or in combination with other therapies.

[0224] By “inflammatory disease” or “inflammatory condition” as used herein is meant any disease, condition, trait, genotype or phenotype characterized by an inflammatory or allergic process as is known in the art, such as inflammation, acute inflammation, chronic inflammation, respiratory disease, atherosclerosis, restenosis, asthma, allergic rhinitis, atopic dermatitis, septic shock, rheumatoid arthritis, inflammatory bowl disease, inflammotory pelvic disease, pain, ocular inflammatory disease, celiac disease, Leigh Syndrome, Glycerol Kinase Deficiency, Familial eosinophilia (FE), autosomal recessive spastic ataxia, laryngeal inflammatory disease; Tuberculosis, Chronic cholecystitis, Bronchiectasis, Silicosis and other pneumoconioses, and any other inflammatory disease, condition, trait, genotype or phenotype that can respond to the modulation of disease related gene expression in a cell or tissue, alone or in combination with other therapies.

[0225] By “autoimmune disease” or “autoimmune condition” as used herein is meant, any disease, condition, trait, genotype or phenotype characterized by autoimmunity as is known in the art, such as multiple sclerosis, diabetes mellitus, lupus, celiac disease, Crohn's disease, ulcerative colitis, Guillain-Barre syndrome, scleroderms, Goodpasture's syndrome, Wegener's granulomatosis, autoimmune epilepsy, Rasmussen's encephalitis, Primary biliary sclerosis, Sclerosing cholangitis, Autoimmune hepatitis, Addison's disease, Hashimoto's thyroiditis, Fibromyalgia, Menier's syndrome; transplantation rejection (e.g., prevention of allograft rejection) pernicious anemia, rheumatoid arthritis, systemic lupus erythematosus, dermatomyositis, Sjogren's syndrome, lupus erythematosus, multiple sclerosis, myasthenia gravis, Reiter's syndrome, Grave's disease, and any other autoimmune disease, condition, trait, genotype or phenotype that can respond to the modulation of disease related gene expression in a cell or tissue, alone or in combination with other therapies.

[0226] By “ocular disease” as used herein is meant, any disease, condition, trait, genotype or phenotype of the eye and related structures, such as Cystoid Macular Edema, Asteroid Hyalosis, Pathological Myopia and Posterior Staphyloma, Toxocariasis (Ocular Larva Migrans), Retinal Vein Occlusion, Posterior Vitreous Detachment, Tractional Retinal Tears, Epiretinal Membrane, Diabetic Retinopathy, Lattice Degeneration, Retinal Vein Occlusion, Retinal Artery Occlusion, Macular Degeneration (e.g., age related macular degeneration such as wet AMD or dry AMD), Toxoplasmosis, Choroidal Melanoma, Acquired Retinoschisis, Hollenhorst Plaque, Idiopathic Central Serous Chorioretinopathy, Macular Hole, Presumed Ocular Histoplasmosis Syndrome, Retinal Macroaneursym, Retinitis Pigmentosa, Retinal Detachment, Hypertensive Retinopathy, Retinal Pigment Epithelium (RPE) Detachment, Papillophlebitis, Ocular Ischemic Syndrome, Coats' Disease, Leber's Miliary Aneurysm, Conjunctival Neoplasms, Allergic Conjunctivitis, Vernal Conjunctivitis, Acute Bacterial Conjunctivitis, Allergic Conjunctivitis &Vernal Keratoconjunctivitis, Viral Conjunctivitis, Bacterial Conjunctivitis, Chlamydial & Gonococcal Conjunctivitis, Conjunctival Laceration, Episcleritis, Scleritis, Pingueculitis, Pterygium, Superior Limbic Keratoconjunctivitis (SLK of Theodore), Toxic Conjunctivitis, Conjunctivitis with Pseudomembrane, Giant Papillary Conjunctivitis, Terrien's Marginal Degeneration, Acanthamoeba Keratitis, Fungal Keratitis, Filamentary Keratitis, Bacterial Keratitis, Keratitis Sicca/Dry Eye Syndrome, Bacterial Keratitis, Herpes Simplex Keratitis, Sterile Corneal Infiltrates, Phlyctenulosis, Corneal Abrasion & Recurrent Corneal Erosion, Corneal Foreign Body, Chemical Burs, Epithelial Basement Membrane Dystrophy (EBMD), Thygeson's Superficial Punctate Keratopathy, Corneal Laceration, Salzmann's Nodular Degeneration, Fuchs' Endothelial Dystrophy, Crystalline Lens Subluxation, Ciliary-Block Glaucoma, Primary Open-Angle Glaucoma, Pigment Dispersion Syndrome and Pigmentary Glaucoma, Pseudoexfoliation Syndrom and Pseudoexfoliative Glaucoma, Anterior Uveitis, Primary Open Angle Glaucoma, Uveitic Glaucoma & Glaucomatocyclitic Crisis, Pigment Dispersion Syndrome & Pigmentary Glaucoma, Acute Angle Closure Glaucoma, Anterior Uveitis, Hyphema, Angle Recession Glaucoma, Lens Induced Glaucoma, Pseudoexfoliation Syndrome and Pseudoexfoliative Glaucoma, Axenfeld-Rieger Syndrome, Neovascular Glaucoma, Pars Planitis, Choroidal Rupture, Duane's Retraction Syndrome, Toxic/Nutritional Optic Neuropathy, Aberrant Regeneration of Cranial Nerve III, Intracranial Mass Lesions, Carotid-Cavernous Sinus Fistula, Anterior Ischemic Optic Neuropathy, Optic Disc Edema & Papilledema, Cranial Nerve III Palsy, Cranial Nerve IV Palsy, Cranial Nerve VI Palsy, Cranial Nerve VII (Facial Nerve) Palsy, Horner's Syndrome, Internuclear Ophthalmoplegia, Optic Nerve Head Hypoplasia, Optic Pit, Tonic Pupil, Optic Nerve Head Drusen, Demyelinating Optic Neuropathy (Optic Neuritis, Retrobulbar Optic Neuritis), Amaurosis Fugax and Transient Ischemic Attack, Pseudotumor Cerebri, Pituitary Adenoma, Molluscum Contagiosum, Canaliculitis, Verruca and Papilloma, Pediculosis and Pthiriasis, Blepharitis, Hordeolum, Preseptal Cellulitis, Chalazion, Basal Cell Carcinoma, Herpes Zoster Ophthalmicus, Pediculosis & Phthiriasis, Blow-out Fracture, Chronic Epiphora, Dacryocystitis, Herpes Simplex Blepharitis, Orbital Cellulitis, Senile Entropion, and Squamous Cell Carcinoma.

[0227] By “nuerologic disease” or “neurological disease” is meant any disease, disorder, or condition affecting the central or peripheral nervous system, including ADHD, AIDS-Neurological Complications, Absence of the Septum Pellucidum, Acquired Epileptiform Aphasia, Acute Disseminated Encephalomyelitis, Adrenoleukodystrophy, Agenesis of the Corpus Callosum, Agnosia, Aicardi Syndrome, Alexander Disease, Alpers' Disease, Alternating Hemiplegia, Alzheimer's Disease, Amyotrophic Lateral Sclerosis, Anencephaly, Aneurysm, Angelman Syndrome, Angiomatosis, Anoxia, Aphasia, Apraxia, Arachnoid Cysts, Arachnoiditis, Arnold-Chiari Malformation, Arteriovenous Malformation, Aspartame, Asperger Syndrome, Ataxia Telangiectasia, Ataxia, Attention Deficit-Hyperactivity Disorder, Autism, Autonomic Dysfunction, Back Pain, Barth Syndrome, Batten Disease, Behcet's Disease, Bell's Palsy, Benign Essential Blepharospasm, Benign Focal Amyotrophy, Benign Intracranial Hypertension, Bernhardt-Roth Syndrome, Binswanger's Disease, Blepharospasm, Bloch-Sulzberger Syndrome, Brachial Plexus Birth Injuries, Brachial Plexus Injuries, Bradbury-Eggleston Syndrome, Brain Aneurysm, Brain Injury, Brain and Spinal Tumors, Brown-Sequard Syndrome, Bulbospinal Muscular Atrophy, Canavan Disease, Carpal Tunnel Syndrome, Causalgia, Cavernomas, Cavernous Angioma, Cavernous Malformation, Central Cervical Cord Syndrome, Central Cord Syndrome, Central Pain Syndrome, Cephalic Disorders, Cerebellar Degeneration, Cerebellar Hypoplasia, Cerebral Aneurysm, Cerebral Arteriosclerosis, Cerebral Atrophy, Cerebral Beriberi, Cerebral Gigantism, Cerebral Hypoxia, Cerebral Palsy, Cerebro-Oculo-Facio-Skeletal Syndrome, Charcot-Marie-Tooth Disorder, Chiari Malformation, Chorea, Choreoacanthocytosis, Chronic Inflammatory Demyelinating Polyneuropathy (CIDP), Chronic Orthostatic Intolerance, Chronic Pain, Cockayne Syndrome Type II, Coffin Lowry Syndrome, Coma, including Persistent Vegetative State, Complex Regional Pain Syndrome, Congenital Facial Diplegia, Congenital Myasthenia, Congenital Myopathy, Congenital Vascular Cavernous Malformations, Corticobasal Degeneration, Cranial Arteritis, Craniosynostosis, Creutzfeldt-Jakob Disease, Cumulative Trauma Disorders, Cushing's Syndrome, Cytomegalic Inclusion Body Disease (CIBD), Cytomegalovirus Infection, Dancing Eyes-Dancing Feet Syndrome, Dandy-Walker Syndrome, Dawson Disease, De Morsier's Syndrome, Dejerine-Klumpke Palsy, Dementia—Multi-Infarct, Dementia—Subcortical, Dementia With Lewy Bodies, Dermatomyositis, Developmental Dyspraxia, Devic's Syndrome, Diabetic Neuropathy, Diffuse Sclerosis, Dravet's Syndrome, Dysautonomia, Dysgraphia, Dyslexia, Dysphagia, Dyspraxia, Dystonias, Early Infantile Epileptic Encephalopathy, Empty Sella Syndrome, Encephalitis Lethargica, Encephalitis and Meningitis, Encephaloceles, Encephalopathy, Encephalotrigeminal Angiomatosis, Epilepsy, Erb's Palsy, Erb-Duchenne and Dejerine-Klumpke Palsies, Fabry's Disease, Fahr's Syndrome, Fainting, Familial Dysautonomia, Familial Hemangioma, Familial Idiopathic Basal Ganglia Calcification, Familial Spastic Paralysis, Febrile Seizures (e.g., GEFS and GEFS plus), Fisher Syndrome, Floppy Infant Syndrome, Friedreich's Ataxia, Gaucher's Disease, Gerstmann's Syndrome, Gerstmann-Straussler-Scheinker Disease, Giant Cell Arteritis, Giant Cell Inclusion Disease, Globoid Cell Leukodystrophy, Glossopharyngeal Neuralgia, Guillain-Barre Syndrome, HTLV-1 Associated Myelopathy, Hallervorden-Spatz Disease, Head Injury, Headache, Hemicrania Continua, Hemifacial Spasm, Hemiplegia Alterans, Hereditary Neuropathies, Hereditary Spastic Paraplegia, Heredopathia Atactica Polyneuritiformis, Herpes Zoster Oticus, Herpes Zoster, Hirayama Syndrome, Holoprosencephaly, Huntington's Disease, Hydranencephaly, Hydrocephalus—Normal Pressure, Hydrocephalus, Hydromyelia, Hypercortisolism, Hypersomnia, Hypertonia, Hypotonia, Hypoxia, Immune-Mediated Encephalomyelitis, Inclusion Body Myositis, Incontinentia Pigmenti, Infantile Hypotonia, Infantile Phytanic Acid Storage Disease, Infantile Refsum Disease, Infantile Spasms, Inflammatory Myopathy, Intestinal Lipodystrophy, Intracranial Cysts, Intracranial Hypertension, Isaac's Syndrome, Joubert Syndrome, Keams-Sayre Syndrome, Kennedy's Disease, Kinsboume syndrome, Kleine-Levin syndrome, Klippel Feil Syndrome, Klippel-Trenaunay Syndrome (KTS), Klüver-Bucy Syndrome, Korsakoffs Amnesic Syndrome, Krabbe Disease, Kugelberg-Welander Disease, Kuru, Lambert-Eaton Myasthenic Syndrome, Landau-Kleffner Syndrome, Lateral Femoral Cutaneous Nerve Entrapment, Lateral Medullary Syndrome, Learning Disabilities, Leigh's Disease, Lennox-Gastaut Syndrome, Lesch-Nyhan Syndrome, Leukodystrophy, Levine-Critchley Syndrome, Lewy Body Dementia, Lissencephaly, Locked-In Syndrome, Lou Gehrig's Disease, Lupus—Neurological Sequelae, Lyme Disease —Neurological Complications, Machado-Joseph Disease, Macrencephaly, Megalencephaly, Melkersson-Rosenthal Syndrome, Meningitis, Menkes Disease, Meralgia Paresthetica, Metachromatic Leukodystrophy, Microcephaly, Migraine, Miller Fisher Syndrome, Mini-Strokes, Mitochondrial Myopathies, Mobius Syndrome, Monomelic Amyotrophy, Motor Neuron Diseases, Moyamoya Disease, Mucolipidoses, Mucopolysaccharidoses, Multi-Infarct Dementia, Multifocal Motor Neuropathy, Multiple Sclerosis, Multiple System Atrophy with Orthostatic Hypotension, Multiple System Atrophy, Muscular Dystrophy, Myasthenia—Congenital, Myasthenia Gravis, Myelinoclastic Diffuse Sclerosis, Myoclonic Encephalopathy of Infants, Myoclonus, Myopathy—Congenital, Myopathy—Thyrotoxic, Myopathy, Myotonia Congenita, Myotonia, Narcolepsy, Neuroacanthocytosis, Neurodegeneration with Brain Iron Accumulation, Neurofibromatosis, Neuroleptic Malignant Syndrome, Neurological Complications of AIDS, Neurological Manifestations of Pompe Disease, Neuromyelitis Optica, Neuromyotonia, Neuronal Ceroid Lipofuscinosis, Neuronal Migration Disorders, Neuropathy—Hereditary, Neurosarcoidosis, Neurotoxicity, Nevus Cavernosus, Niemann-Pick Disease, O'Sullivan-McLeod Syndrome, Occipital Neuralgia, Occult Spinal Dysraphism Sequence, Ohtahara Syndrome, Olivopontocerebellar Atrophy, Opsoclonus Myoclonus, Orthostatic Hypotension, Overuse Syndrome, Pain—Chronic, Paraneoplastic Syndromes, Paresthesia, Parkinson's Disease, Parmyotonia Congenita, Paroxysmal Choreoathetosis, Paroxysmal Hemicrania, Parry-Romberg, Pelizaeus-Merzbacher Disease, Pena Shokeir II Syndrome, Perineural Cysts, Periodic Paralyses, Peripheral Neuropathy, Periventricular Leukomalacia, Persistent Vegetative State, Pervasive Developmental Disorders, Phytanic Acid Storage Disease, Pick's Disease, Piriformis Syndrome, Pituitary Tumors, Polymyositis, Pompe Disease, Porencephaly, Post-Polio Syndrome, Postherpetic Neuralgia, Postinfectious Encephalomyelitis, Postural Hypotension, Postural Orthostatic Tachycardia Syndrome, Postural Tachycardia Syndrome, Primary Lateral Sclerosis, Prion Diseases, Progressive Hemifacial Atrophy, Progressive Locomotor Ataxia, Progressive Multifocal Leukoencephalopathy, Progressive Sclerosing Poliodystrophy, Progressive Supranuclear Palsy, Pseudotumor Cerebri, Pyridoxine Dependent and Pyridoxine Responsive Siezure Disorders, Ramsay Hunt Syndrome Type I, Ramsay Hunt Syndrome Type II, Rasmussen's Encephalitis and other autoimmune epilepsies, Reflex Sympathetic Dystrophy Syndrome, Refsum Disease —Infantile, Refsum Disease, Repetitive Motion Disorders, Repetitive Stress Injuries, Restless Legs Syndrome, Retrovirus-Associated Myelopathy, Rett Syndrome, Reye's Syndrome, Riley-Day Syndrome, SUNCT Headache, Sacral Nerve Root Cysts, Saint Vitus Dance, Salivary Gland Disease, Sandhoff Disease, Schilder's Disease, Schizencephaly, Seizure Disorders, Septo-Optic Dysplasia, Severe Myoclonic Epilepsy of Infancy (SMEI), Shaken Baby Syndrome, Shingles, Shy-Drager Syndrome, Sjogren's Syndrome, Sleep Apnea, Sleeping Sickness, Soto's Syndrome, Spasticity, Spina Bifida, Spinal Cord Infarction, Spinal Cord Injury, Spinal Cord Tumors, Spinal Muscular Atrophy, Spinocerebellar Atrophy, Steele-Richardson-Olszewski Syndrome, Stiff-Person Syndrome, Striatonigral Degeneration, Stroke, Sturge-Weber Syndrome, Subacute Sclerosing Panencephalitis, Subcortical Arteriosclerotic Encephalopathy, Swallowing Disorders, Sydenham Chorea, Syncope, Syphilitic Spinal Sclerosis, Syringohydromyelia, Syringomyelia, Systemic Lupus Erythematosus, Tabes Dorsalis, Tardive Dyskinesia, Tarlov Cysts, Tay-Sachs Disease, Temporal Arteritis, Tethered Spinal Cord Syndrome, Thomsen Disease, Thoracic Outlet Syndrome, Thyrotoxic Myopathy, Tic Douloureux, Todd's Paralysis, Tourette Syndrome, Transient Ischemic Attack, Transmissible Spongiform Encephalopathies, Transverse Myelitis, Traumatic Brain Injury, Tremor, Trigeminal Neuralgia, Tropical Spastic Paraparesis, Tuberous Sclerosis, Vascular Erectile Tumor, Vasculitis including Temporal Arteritis, Von Economo's Disease, Von Hippel-Lindau disease (VHL), Von Recklinghausen's Disease, Wallenberg's Syndrome, Werdnig-Hoffman Disease, Wernicke-Korsakoff Syndrome, West Syndrome, Whipple's Disease, Williams Syndrome, Wilson's Disease, X-Linked Spinal and Bulbar Muscular Atrophy, and Zellweger Syndrome.

[0228] By “respiratory disease” is meant, any disease or condition affecting the respiratory tract, such as asthma, chronic obstructive pulmonary disease or “COPD”, allergic rhinitis, sinusitis, pulmonary vasoconstriction, inflammation, allergies, impeded respiration, respiratory distress syndrome, cystic fibrosis, pulmonary hypertension, pulmonary vasoconstriction, emphysema, and any other respiratory disease, condition, trait, genotype or phenotype that can respond to the modulation of disease related gene expression in a cell or tissue, alone or in combination with other therapies.

[0229] In one embodiment of the present invention, each sequence of a siNA molecule of the invention is independently about 15 to about 30 nucleotides in length, in specific embodiments about 15, 16, 17, 18, 19, 20, 21, 22, 23, 24, 25, 26, 27, 28, 29, or 30 nucleotides in length. In another embodiment, the siNA duplexes of the invention independently comprise about 15 to about 30 base pairs (e.g., about 15, 16, 17, 18, 19, 20, 21, 22, 23, 24, 25, 26, 27, 28, 29, or 30). In another embodiment, one or more strands of the siNA molecule of the invention independently comprises about 15 to about 30 nucleotides (e.g., about 15, 16, 17, 18, 19, 20, 21, 22, 23, 24, 25, 26, 27, 28, 29, or 30) that are complementary to a target nucleic acid molecule. In yet another embodiment, siNA molecules of the invention comprising hairpin or circular structures are about 35 to about 55 (e.g., about 35, 40, 45, 50 or 55) nucleotides in length, or about 38 to about 44 (e.g., about 38, 39, 40, 41, 42, 43, or 44) nucleotides in length and comprising about 15 to about 25 (e.g., about 15, 16, 17, 18, 19, 20, 21, 22, 23, 24, or 25) base pairs. Exemplary siNA molecules of the invention are shown in Table II. Exemplary synthetic siNA molecules of the invention are shown in Table m and/or FIGS. 4-5.

[0230] As used herein “cell” is used in its usual biological sense, and does not refer to an entire multicellular organism, e.g., specifically does not refer to a human. The cell can be present in an organism, e.g., birds, plants and mammals such as humans, cows, sheep, apes, monkeys, swine, dogs, and cats. The cell can be prokaryotic (e.g., bacterial cell) or eukaryotic (e.g., mammalian or plant cell). The cell can be of somatic or germ line origin, totipotent or pluripotent, dividing or non-dividing. The cell can also be derived from or can comprise a gamete or embryo, a stem cell, or a fully differentiated cell.

[0231] The siNA molecules of the invention are added directly, or can be complexed with cationic lipids, packaged within liposomes, or otherwise delivered to target cells or tissues. The nucleic acid or nucleic acid complexes can be locally administered to relevant tissues ex vivo, or in vivo through direct dermal application, transdermal application, or injection, with or without their incorporation in biopolymers. In particular embodiments, the nucleic acid molecules of the invention comprise sequences shown in Tables II-III and/or FIGS. 4-5. Examples of such nucleic acid molecules consist essentially of sequences defined in these tables and figures. Furthermore, the chemically modified constructs described in Table IV can be applied to any siNA sequence of the invention.

[0232] In another aspect, the invention provides mammalian cells containing one or more siNA molecules of this invention. The one or more siNA molecules can independently be targeted to the same or different sites.

[0233] By “RNA” is meant a molecule comprising at least one ribonucleotide residue. By “ribonucleotide” is meant a nucleotide with a hydroxyl group at the 2′ position of a β-D-ribofuranose moiety. The terms include double-stranded RNA, single-stranded RNA, isolated RNA such as partially purified RNA, essentially pure RNA, synthetic RNA, recombinantly produced RNA, as well as altered RNA that differs from naturally occurring RNA by the addition, deletion, substitution and/or alteration of one or more nucleotides. Such alterations can include addition of non-nucleotide material, such as to the end(s) of the siNA or internally, for example at one or more nucleotides of the RNA. Nucleotides in the RNA molecules of the instant invention can also comprise non-standard nucleotides, such as non-naturally occurring nucleotides or chemically synthesized nucleotides or deoxynucleotides. These altered RNAs can be referred to as analogs or analogs of naturally-occurring RNA.

[0234] By “subject” is meant an organism, which is a donor or recipient of explanted cells or the cells themselves. “Subject” also refers to an organism to which the nucleic acid molecules of the invention can be administered. A subject can be a mammal or mammalian cells, including a human or human cells.

[0235] The term “phosphorothioate” as used herein refers to an internucleotide linkage having Formula I, wherein Z and/or W comprise a sulfur atom. Hence, the term phosphorothioate refers to both phosphorothioate and phosphorodithioate internucleotide linkages.

[0236] The term “phosphonoacetate” as used herein refers to an internucleotide linkage having Formula I, wherein Z and/or W comprise an acetyl or protected acetyl group.

[0237] The term “thiophosphonoacetate” as used herein refers to an internucleotide linkage having Formula I, wherein Z comprises an acetyl or protected acetyl group and W comprises a sulfur atom or alternately W comprises an acetyl or protected acetyl group and Z comprises a sulfur atom.

[0238] The term “universal base” as used herein refers to nucleotide base analogs that form base pairs with each of the natural DNA/RNA bases with little discrimination between them. Non-limiting examples of universal bases include C-phenyl, C-naphthyl and other aromatic derivatives, inosine, azole carboxamides, and nitroazole derivatives such as 3-nitropyrrole, 4-nitroindole, 5-nitroindole, and 6-nitroindole as known in the art (see for example Loakes, 2001, Nucleic Acids Research, 29, 2437-2447).

[0239] The term “acyclic nucleotide” as used herein refers to any nucleotide having an acyclic ribose sugar, for example where any of the ribose carbons (C1, C2, C3, C4, or C5), are independently or in combination absent from the nucleotide.

[0240] The nucleic acid molecules of the instant invention, individually, or in combination or in conjunction with other drugs, can be used to for preventing or treating cancer, inflammatory, autoimmune, allergicc, or proliferative diseases, conditions, or disorders in a subject or organism.

[0241] For example, the siNA molecules can be administered to a subject or can be administered to other appropriate cells evident to those skilled in the art, individually or in combination with one or more drugs under conditions suitable for the treatment.

[0242] In a further embodiment, the siNA molecules can be used in combination with other known treatments to prevent or treat cancer, inflammatory, autoimmune, neuroligic, ocular, respiratory, allergic, and/or proliferative diseases, conditions, or disorders in a subject or organism. For example, the described molecules could be used in combination with one or more known compounds, treatments, or procedures to prevent or treat cancer, inflammatory, autoimmune, neuroligic, ocular, respiratory, allergic, and/or proliferative diseases, conditions, or disorders in a subject or organism as are known in the art.

[0243] In one embodiment, the invention features an expression vector comprising a nucleic acid sequence encoding at least one siNA molecule of the invention, in a manner which allows expression of the siNA molecule. For example, the vector can contain sequence(s) encoding both strands of a siNA molecule comprising a duplex. The vector can also contain sequence(s) encoding a single nucleic acid molecule that is self-complementary and thus forms a siNA molecule. Non-limiting examples of such expression vectors are described in Paul et al., 2002, Nature Biotechnology, 19, 505; Miyagishi and Taira, 2002, Nature Biotechnology, 19, 497; Lee et al., 2002, Nature Biotechnology, 19, 500; and Novina et al., 2002, Nature Medicine, advance online publication doi: 10.1038/nm725.

[0244] In another embodiment, the invention features a mammalian cell, for example, a human cell, including an expression vector of the invention.

[0245] In yet another embodiment, the expression vector of the invention comprises a sequence for a siNA molecule having complementarity to a RNA molecule referred to by a Genbank Accession numbers, for example Genbank Accession Nos. shown in Table I.

[0246] In one embodiment, an expression vector of the invention comprises a nucleic acid sequence encoding two or more siNA molecules, which can be the same or different.

[0247] In another aspect of the invention, siNA molecules that interact with target RNA molecules and down-regulate gene encoding target RNA molecules (for example target RNA molecules referred to by Genbank Accession numbers herein) are expressed from transcription units inserted into DNA or RNA vectors. The recombinant vectors can be DNA plasmids or viral vectors. siNA expressing viral vectors can be constructed based on, but not limited to, adeno-associated virus, retrovirus, adenovirus, or alphavirus. The recombinant vectors capable of expressing the siNA molecules can be delivered as described herein, and persist in target cells. Alternatively, viral vectors can be used that provide for transient expression of siNA molecules. Such vectors can be repeatedly administered as necessary. Once expressed, the siNA molecules bind and down-regulate gene function or expression via RNA interference (RNAi). Delivery of siNA expressing vectors can be systemic, such as by intravenous or intramuscular administration, by administration to target cells ex-planted from a subject followed by reintroduction into the subject, or by any other means that would allow for introduction into the desired target cell.

[0248] By “vectors” is meant any nucleic acid- and/or viral-based technique used to deliver a desired nucleic acid.

[0249] Other features and advantages of the invention will be apparent from the following description of the preferred embodiments thereof, and from the claims.

### BRIEF DESCRIPTION OF THE DRAWINGS

[0250] FIG. 1 shows a non-limiting example of a scheme for the synthesis of siNA molecules. The complementary siNA sequence strands, strand 1 and strand 2, are synthesized in tandem and are connected by a cleavable linkage, such as a nucleotide succinate or abasic succinate, which can be the same or different from the cleavable linker used for solid phase synthesis on a solid support. The synthesis can be either solid phase or solution phase, in the example shown, the synthesis is a solid phase synthesis. The synthesis is performed such that a protecting group, such as a dimethoxytrityl group, remains intact on the terminal nucleotide of the tandem oligonucleotide. Upon cleavage and deprotection of the oligonucleotide, the two siNA strands spontaneously hybridize to form a siNA duplex, which allows the purification of the duplex by utilizing the properties of the terminal protecting group, for example by applying a trityl on purification method wherein only duplexes/oligonucleotides with the terminal protecting group are isolated.

[0251] FIG. 2 shows a MALDI-TOF mass spectrum of a purified siNA duplex synthesized by a method of the invention. The two peaks shown correspond to the predicted mass of the separate siNA sequence strands. This result demonstrates that the siNA duplex generated from tandem synthesis can be purified as a single entity using a simple trityl-on purification methodology.

[0252] FIG. 3 shows a non-limiting proposed mechanistic representation of target RNA degradation involved in RNAi. Double-stranded RNA (dsRNA), which is generated by RNA-dependent RNA polymerase (RdRP) from foreign single-stranded RNA, for example viral, transposon, or other exogenous RNA, activates the DICER enzyme that in turn generates siNA duplexes. Alternately, synthetic or expressed siNA can be introduced directly into a cell by appropriate means. An active siNA complex forms which recognizes a target RNA, resulting in degradation of the target RNA by the RISC endonuclease complex or in the synthesis of additional RNA by RNA-dependent RNA polymerase (RdRP), which can activate DICER and result in additional siNA molecules, thereby amplifying the RNAi response.

[0253] FIG. 4A-F shows non-limiting examples of chemically-modified siNA constructs of the present invention. In the figure, N stands for any nucleotide (adenosine, guanosine, cytosine, uridine, or optionally thymidine, for example thymidine can be substituted in the overhanging regions designated by parenthesis (N N). Various modifications are shown for the sense and antisense strands of the siNA constructs.

[0254] FIG. 4A: The sense strand comprises 21 nucleotides wherein the two terminal 3′-nucleotides are optionally base paired and wherein all nucleotides present are ribonucleotides except for (N N) nucleotides, which can comprise ribonucleotides, deoxynucleotides, universal bases, or other chemical modifications described herein. The antisense strand comprises 21 nucleotides, optionally having a 3′-terminal glyceryl moiety wherein the two terminal 3′-nucleotides are optionally complementary to the target RNA sequence, and wherein all nucleotides present are ribonucleotides except for (N N) nucleotides, which can comprise ribonucleotides, deoxynucleotides, universal bases, or other chemical modifications described herein. A modified internucleotide linkage, such as a phosphorothioate, phosphorodithioate or other modified internucleotide linkage as described herein, shown as “s”, optionally connects the (N N) nucleotides in the antisense strand.

[0255] FIG. 4B: The sense strand comprises 21 nucleotides wherein the two terminal 3′-nucleotides are optionally base paired and wherein all pyrimidine nucleotides that may be present are 2′-deoxy-2′-fluoro modified nucleotides and all purine nucleotides that may be present are 2′-O-methyl modified nucleotides except for (N N) nucleotides, which can comprise ribonucleotides, deoxynucleotides, universal bases, or other chemical modifications described herein. The antisense strand comprises 21 nucleotides, optionally having a 3′-terminal glyceryl moiety and wherein the two terminal 3′-nucleotides are optionally complementary to the target RNA sequence, and wherein all pyrimidine nucleotides that may be present are 2′-deoxy-2′-fluoro modified nucleotides and all purine nucleotides that may be present are 2′-O-methyl modified nucleotides except for (N N) nucleotides, which can comprise ribonucleotides, deoxynucleotides, universal bases, or other chemical modifications described herein. A modified internucleotide linkage, such as a phosphorothioate, phosphorodithioate or other modified internucleotide linkage as described herein, shown as “s”, optionally connects the (N N) nucleotides in the sense and antisense strand.

[0256] FIG. 4C: The sense strand comprises 21 nucleotides having 5′- and 3′-terminal cap moieties wherein the two terminal 3′-nucleotides are optionally base paired and wherein all pyrimidine nucleotides that may be present are 2′-O-methyl or 2′-deoxy-2′-fluoro modified nucleotides except for (N N) nucleotides, which can comprise ribonucleotides, deoxynucleotides, universal bases, or other chemical modifications described herein. The antisense strand comprises 21 nucleotides, optionally having a 3′-terminal glyceryl moiety and wherein the two terminal 3′-nucleotides are optionally complementary to the target RNA sequence, and wherein all pyrimidine nucleotides that may be present are 2′-deoxy-2′-fluoro modified nucleotides except for (N N) nucleotides, which can comprise ribonucleotides, deoxynucleotides, universal bases, or other chemical modifications described herein. A modified internucleotide linkage, such as a phosphorothioate, phosphorodithioate or other modified internucleotide linkage as described herein, shown as “s”, optionally connects the (N N) nucleotides in the antisense strand.

[0257] FIG. 4D: The sense strand comprises 21 nucleotides having 5′- and 3′-terminal cap moieties wherein the two terminal 3′-nucleotides are optionally base paired and wherein all pyrimidine nucleotides that may be present are 2′-deoxy-2′-fluoro modified nucleotides except for (N N) nucleotides, which can comprise ribonucleotides, deoxynucleotides, universal bases, or other chemical modifications described herein and wherein and all purine nucleotides that may be present are 2′-deoxy nucleotides. The antisense strand comprises 21 nucleotides, optionally having a 3′-terminal glyceryl moiety and wherein the two terminal 3′-nucleotides are optionally complementary to the target RNA sequence, wherein all pyrimidine nucleotides that may be present are 2′-deoxy-2′-fluoro modified nucleotides and all purine nucleotides that may be present are 2′-O-methyl modified nucleotides except for (N N) nucleotides, which can comprise ribonucleotides, deoxynucleotides, universal bases, or other chemical modifications described herein. A modified internucleotide linkage, such as a phosphorothioate, phosphorodithioate or other modified internucleotide linkage as described herein, shown as “s”, optionally connects the (N N) nucleotides in the antisense strand.

[0258] FIG. 4E: The sense strand comprises 21 nucleotides having 5′- and 3′-terminal cap moieties wherein the two terminal 3′-nucleotides are optionally base paired and wherein all pyrimidine nucleotides that may be present are 2′-deoxy-2′-fluoro modified nucleotides except for (N N) nucleotides, which can comprise ribonucleotides, deoxynucleotides, universal bases, or other chemical modifications described herein. The antisense strand comprises 21 nucleotides, optionally having a 3′-terminal glyceryl moiety and wherein the two terminal 3′-nucleotides are optionally complementary to the target RNA sequence, and wherein all pyrimidine nucleotides that may be present are 2′-deoxy-2′-fluoro modified nucleotides and all purine nucleotides that may be present are 2′-O-methyl modified nucleotides except for (N N) nucleotides, which can comprise ribonucleotides, deoxynucleotides, universal bases, or other chemical modifications described herein. A modified internucleotide linkage, such as a phosphorothioate, phosphorodithioate or other modified internucleotide linkage as described herein, shown as “s”, optionally connects the (N N) nucleotides in the antisense strand.

[0259] FIG. 4F: The sense strand comprises 21 nucleotides having 5′- and 3′-terminal cap moieties wherein the two terminal 3′-nucleotides are optionally base paired and wherein all pyrimidine nucleotides that may be present are 2′-deoxy-2′-fluoro modified nucleotides except for (N N) nucleotides, which can comprise ribonucleotides, deoxynucleotides, universal bases, or other chemical modifications described herein and wherein and all purine nucleotides that may be present are 2′-deoxy nucleotides. The antisense strand comprises 21 nucleotides, optionally having a 3′-terminal glyceryl moiety and wherein the two terminal 3′-nucleotides are optionally complementary to the target RNA sequence, and having one 3′-terminal phosphorothioate internucleotide linkage and wherein all pyrimidine nucleotides that may be present are 2′-deoxy-2′-fluoro modified nucleotides and all purine nucleotides that may be present are 2′-deoxy nucleotides except for (N N) nucleotides, which can comprise ribonucleotides, deoxynucleotides, universal bases, or other chemical modifications described herein. A modified internucleotide linkage, such as a phosphorothioate, phosphorodithioate or other modified internucleotide linkage as described herein, shown as “s”, optionally connects the (N N) nucleotides in the antisense strand. The antisense strand of constructs A-F comprise sequence complementary to any target nucleic acid sequence of the invention. Furthermore, when a glyceryl moiety (L) is present at the 3′-end of the antisense strand for any construct shown in FIG. 4 A-F, the modified internucleotide linkage is optional.

[0260] FIG. 5A-F shows non-limiting examples of specific chemically-modified siNA sequences of the invention. A-F applies the chemical modifications described in FIG. 4A-F to a MAP kinase (c-JUN) siNA sequence. Such chemical modifications can be applied to any MAP kinase sequence and/or MAP kinase polymorphism sequence.

[0261] FIG. 6 shows non-limiting examples of different siNA constructs of the invention. The examples shown (constructs 1, 2, and 3) have 19 representative base pairs; however, different embodiments of the invention include any number of base pairs described herein. Bracketed regions represent nucleotide overhangs, for example, comprising about 1, 2, 3, or 4 nucleotides in length, preferably about 2 nucleotides. Constructs 1 and 2 can be used independently for RNAi activity. Construct 2 can comprise a polynucleotide or non-nucleotide linker, which can optionally be designed as a biodegradable linker. In one embodiment, the loop structure shown in construct 2 can comprise a biodegradable linker that results in the formation of construct 1 in vivo and/or in vitro. In another example, construct 3 can be used to generate construct 2 under the same principle wherein a linker is used to generate the active siNA construct 2 in vivo and/or in vitro, which can optionally utilize another biodegradable linker to generate the active siNA construct 1 in vivo and/or in vitro. As such, the stability and/or activity of the siNA constructs can be modulated based on the design of the siNA construct for use in vivo or in vitro and/or in vitro.

[0262] FIG. 7A-C is a diagrammatic representation of a scheme utilized in generating an expression cassette to generate siNA hairpin constructs.

[0263] FIG. 7A: A DNA oligomer is synthesized with a 5′-restriction site (R1) sequence followed by a region having sequence identical (sense region of siNA) to a predetermined MAP kinase target sequence, wherein the sense region comprises, for example, about 19, 20, 21, or 22 nucleotides (N) in length, which is followed by a loop sequence of defined sequence (X), comprising, for example, about 3 to about 10 nucleotides.

[0264] FIG. 7B: The synthetic construct is then extended by DNA polymerase to generate a hairpin structure having self-complementary sequence that will result in a siNA transcript having specificity for a MAP kinase target sequence and having self-complementary sense and antisense regions.

[0265] FIG. 7C: The construct is heated (for example to about 95° C.) to linearize the sequence, thus allowing extension of a complementary second DNA strand using a primer to the 3′-restriction sequence of the first strand. The double-stranded DNA is then inserted into an appropriate vector for expression in cells. The construct can be designed such that a 3′-terminal nucleotide overhang results from the transcription, for example, by engineering restriction sites and/or utilizing a poly-U termination region as described in Paul et al., 2002, Nature Biotechnology, 29, 505-508.

[0266] FIG. 8A-C is a diagrammatic representation of a scheme utilized in generating an expression cassette to generate double-stranded siNA constructs.

[0267] FIG. 8A: A DNA oligomer is synthesized with a 5′-restriction (R1) site sequence followed by a region having sequence identical (sense region of siNA) to a predetermined MAP kinase target sequence, wherein the sense region comprises, for example, about 19, 20, 21, or 22 nucleotides (N) in length, and which is followed by a 3′-restriction site (R2) which is adjacent to a loop sequence of defined sequence (X).

[0268] FIG. 8B: The synthetic construct is then extended by DNA polymerase to generate a hairpin structure having self-complementary sequence.

[0269] FIG. 8C: The construct is processed by restriction enzymes specific to R1 and R2 to generate a double-stranded DNA which is then inserted into an appropriate vector for expression in cells. The transcription cassette is designed such that a U6 promoter region flanks each side of the dsDNA which generates the separate sense and antisense strands of the siNA. Poly T termination sequences can be added to the constructs to generate U overhangs in the resulting transcript.

[0270] FIG. 9A-E is a diagrammatic representation of a method used to determine target sites for siNA mediated RNAi within a particular target nucleic acid sequence, such as messenger RNA.

[0271] FIG. 9A: A pool of siNA oligonucleotides are synthesized wherein the antisense region of the siNA constructs has complementarity to target sites across the target nucleic acid sequence, and wherein the sense region comprises sequence complementary to the antisense region of the siNA.

[0272] FIGS. 9B&C: (FIG. 9B) The sequences are pooled and are inserted into vectors such that (FIG. 9C) transfection of a vector into cells results in the expression of the siNA.

[0273] FIG. 9D: Cells are sorted based on phenotypic change that is associated with modulation of the target nucleic acid sequence.

[0274] FIG. 9E: The siNA is isolated from the sorted cells and is sequenced to identify efficacious target sites within the target nucleic acid sequence.

[0275] FIG. 10 shows non-limiting examples of different stabilization chemistries (1-10) that can be used, for example, to stabilize the 3′-end of siNA sequences of the invention, including (1) [3-3′]-inverted deoxyribose; (2) deoxyribonucleotide; (3) [5′-3′]-3′-deoxyribonucleotide; (4) [5′-3′]-ribonucleotide; (5) [5′-3′]-3′-O-methyl ribonucleotide; (6) 3′-glyceryl; (7) [3′-5′]-3′-deoxyribonucleotide; (8) [3′-3′]-deoxyribonucleotide; (9) [5′-2′]-deoxyribonucleotide; and (10) [5-3′]-dideoxyribonucleotide. In addition to modified and unmodified backbone chemistries indicated in the figure, these chemistries can be combined with different backbone modifications as described herein, for example, backbone modifications having Formula I. In addition, the 2′-deoxy nucleotide shown 5′ to the terminal modifications shown can be another modified or unmodified nucleotide or non-nucleotide described herein, for example modifications having any of Formulae I-VII or any combination thereof.

[0276] FIG. 11 shows a non-limiting example of a strategy used to identify chemically modified siNA constructs of the invention that are nuclease resistance while preserving the ability to mediate RNAi activity. Chemical modifications are introduced into the siNA construct based on educated design parameters (e.g. introducing 2′-mofications, base modifications, backbone modifications, terminal cap modifications etc). The modified construct in tested in an appropriate system (e.g. human serum for nuclease resistance, shown, or an animal model for PK/delivery parameters). In parallel, the siNA construct is tested for RNAi activity, for example in a cell culture system such as a luciferase reporter assay). Lead siNA constructs are then identified which possess a particular characteristic while maintaining RNAi activity, and can be further modified and assayed once again. This same approach can be used to identify siNA-conjugate molecules with improved pharmacokinetic profiles, delivery, and RNAi activity.

[0277] FIG. 12 shows non-limiting examples of phosphorylated siNA molecules of the invention, including linear and duplex constructs and asymmetric derivatives thereof.

[0278] FIG. 13 shows non-limiting examples of chemically modified terminal phosphate groups of the invention.

[0279] FIG. 14A shows a non-limiting example of methodology used to design self complementary DFO constructs utilizing palindrome and/or repeat nucleic acid sequences that are identified in a target nucleic acid sequence. (i) A palindrome or repeat sequence is identified in a nucleic acid target sequence. (ii) A sequence is designed that is complementary to the target nucleic acid sequence and the palindrome sequence. (iii) An inverse repeat sequence of the non-palindrome/repeat portion of the complementary sequence is appended to the 3′-end of the complementary sequence to generate a self complementary DFO molecule comprising sequence complementary to the nucleic acid target. (iv) The DFO molecule can self-assemble to form a double stranded oligonucleotide. FIG. 14B shows a non-limiting representative example of a duplex forming oligonucleotide sequence. FIG. 14C shows a non-limiting example of the self assembly schematic of a representative duplex forming oligonucleotide sequence. FIG. 14D shows a non-limiting example of the self assembly schematic of a representative duplex forming oligonucleotide sequence followed by interaction with a target nucleic acid sequence resulting in modulation of gene expression.

[0280] FIG. 15 shows a non-limiting example of the design of self complementary DFO constructs utilizing palindrome and/or repeat nucleic acid sequences that are incorporated into the DFO constructs that have sequence complementary to any target nucleic acid sequence of interest. Incorporation of these palindrome/repeat sequences allow the design of DFO constructs that form duplexes in which each strand is capable of mediating modulation of target gene expression, for example by RNAi. First, the target sequence is identified. A complementary sequence is then generated in which nucleotide or non-nucleotide modifications (shown as X or Y) are introduced into the complementary sequence that generate an artificial palindrome (shown as XYXYXY in the Figure). An inverse repeat of the non-palindrome/repeat complementary sequence is appended to the 3′-end of the complementary sequence to generate a self complementary DFO comprising sequence complementary to the nucleic acid target. The DFO can self-assemble to form a double stranded oligonucleotide.

[0281] FIG. 16 shows non-limiting examples of multifunctional siNA molecules of the invention comprising two separate polynucleotide sequences that are each capable of mediating RNAi directed cleavage of differing target nucleic acid sequences. FIG. 16A shows a non-limiting example of a multifunctional siNA molecule having a first region that is complementary to a first target nucleic acid sequence (complementary region 1) and a second region that is complementary to a second target nucleic acid sequence (complementary region 2), wherein the first and second complementary regions are situated at the 3′-ends of each polynucleotide sequence in the multifunctional siNA. The dashed portions of each polynucleotide sequence of the multifunctional siNA construct have complementarity with regard to corresponding portions of the siNA duplex, but do not have complementarity to the target nucleic acid sequences. FIG. 16B shows a non-limiting example of a multifunctional siNA molecule having a first region that is complementary to a first target nucleic acid sequence (complementary region 1) and a second region that is complementary to a second target nucleic acid sequence (complementary region 2), wherein the first and second complementary regions are situated at the 5′-ends of each polynucleotide sequence in the multifunctional siNA. The dashed portions of each polynucleotide sequence of the multifunctional siNA construct have complementarity with regard to corresponding portions of the siNA duplex, but do not have complementarity to the target nucleic acid sequences.

[0282] FIG. 17 shows non-limiting examples of multifunctional siNA molecules of the invention comprising a single polynucleotide sequence comprising distinct regions that are each capable of mediating RNAi directed cleavage of differing target nucleic acid sequences. FIG. 17A shows a non-limiting example of a multifunctional siNA molecule having a first region that is complementary to a first target nucleic acid sequence (complementary region 1) and a second region that is complementary to a second target nucleic acid sequence (complementary region 2), wherein the second complementary region is situated at the 3′-end of the polynucleotide sequence in the multifunctional siNA. The dashed portions of each polynucleotide sequence of the multifunctional siNA construct have complementarity with regard to corresponding portions of the siNA duplex, but do not have complementarity to the target nucleic acid sequences. FIG. 17B shows a non-limiting example of a multifunctional siNA molecule having a first region that is complementary to a first target nucleic acid sequence (complementary region 1) and a second region that is complementary to a second target nucleic acid sequence (complementary region 2), wherein the first complementary region is situated at the 5′-end of the polynucleotide sequence in the multifunctional siNA. The dashed portions of each polynucleotide sequence of the multifunctional siNA construct have complementarity with regard to corresponding portions of the siNA duplex, but do not have complementarity to the target nucleic acid sequences. In one embodiment, these multifunctional siNA constructs are processed in vivo or in vitro to generate multifunctional siNA constructs as shown in FIG. 16.

[0283] FIG. 18 shows non-limiting examples of multifunctional siNA molecules of the invention comprising two separate polynucleotide sequences that are each capable of mediating RNAi directed cleavage of differing target nucleic acid sequences and wherein the multifunctional siNA construct further comprises a self complementary, palindrome, or repeat region, thus enabling shorter bifuctional siNA constructs that can mediate RNA interference against differing target nucleic acid sequences. FIG. 18A shows a non-limiting example of a multifunctional siNA molecule having a first region that is complementary to a first target nucleic acid sequence (complementary region 1) and a second region that is complementary to a second target nucleic acid sequence (complementary region 2), wherein the first and second complementary regions are situated at the 3′-ends of each polynucleotide sequence in the multifunctional siNA, and wherein the first and second complementary regions further comprise a self complementary, palindrome, or repeat region. The dashed portions of each polynucleotide sequence of the multifunctional siNA construct have complementarity with regard to corresponding portions of the siNA duplex, but do not have complementarity to the target nucleic acid sequences. FIG. 18B shows a non-limiting example of a multifunctional siNA molecule having a first region that is complementary to a first target nucleic acid sequence (complementary region 1) and a second region that is complementary to a second target nucleic acid sequence (complementary region 2), wherein the first and second complementary regions are situated at the 5′-ends of each polynucleotide sequence in the multifunctional siNA, and wherein the first and second complementary regions further comprise a self complementary, palindrome, or repeat region. The dashed portions of each polynucleotide sequence of the multifunctional siNA construct have complementarity with regard to corresponding portions of the siNA duplex, but do not have complementarity to the target nucleic acid sequences.

[0284] FIG. 19 shows non-limiting examples of multifunctional siNA molecules of the invention comprising a single polynucleotide sequence comprising distinct regions that are each capable of mediating RNAi directed cleavage of differing target nucleic acid sequences and wherein the multifunctional siNA construct further comprises a self complementary, palindrome, or repeat region, thus enabling shorter bifuctional siNA constructs that can mediate RNA interference against differing target nucleic acid sequences. FIG. 19A shows a non-limiting example of a multifunctional siNA molecule having a first region that is complementary to a first target nucleic acid sequence (complementary region 1) and a second region that is complementary to a second target nucleic acid sequence (complementary region 2), wherein the second complementary region is situated at the 3′-end of the polynucleotide sequence in the multifunctional siNA, and wherein the first and second complementary regions further comprise a self complementary, palindrome, or repeat region. The dashed portions of each polynucleotide sequence of the multifunctional siNA construct have complementarity with regard to corresponding portions of the siNA duplex, but do not have complementarity to the target nucleic acid sequences. FIG. 19B shows a non-limiting example of a multifunctional siNA molecule having a first region that is complementary to a first target nucleic acid sequence (complementary region 1) and a second region that is complementary to a second target nucleic acid sequence (complementary region 2), wherein the first complementary region is situated at the 5′-end of the polynucleotide sequence in the multifunctional siNA, and wherein the first and second complementary regions further comprise a self complementary, palindrome, or repeat region. The dashed portions of each polynucleotide sequence of the multifunctional siNA construct have complementarity with regard to corresponding portions of the siNA duplex, but do not have complementarity to the target nucleic acid sequences. In one embodiment, these multifunctional siNA constructs are processed in vivo or in vitro to generate multifunctional siNA constructs as shown in FIG. 18.

[0285] FIG. 20 shows a non-limiting example of how multifunctional siNA molecules of the invention can target two separate target nucleic acid molecules, such as separate RNA molecules encoding differing proteins, for example, a cytokine and its corresponding receptor, differing viral strains, a virus and a cellular protein involved in viral infection or replication, or differing proteins involved in a common or divergent biologic pathway that is implicated in the maintenance of progression of disease. Each strand of the multifunctional siNA construct comprises a region having complementarity to separate target nucleic acid molecules. The multifunctional siNA molecule is designed such that each strand of the siNA can be utilized by the RISC complex to initiate RNA interference mediated cleavage of its corresponding target. These design parameters can include destabilization of each end of the siNA construct (see for example Schwarz et al., 2003, Cell, 115, 199-208). Such destabilization can be accomplished for example by using guanosine-cytidine base pairs, alternate base pairs (e.g., wobbles), or destabilizing chemically modified nucleotides at terminal nucleotide positions as is known in the art.

[0286] FIG. 21 shows a non-limiting example of how multifunctional siNA molecules of the invention can target two separate target nucleic acid sequences within the same target nucleic acid molecule, such as alternate coding regions of a RNA, coding and non-coding regions of a RNA, or alternate splice variant regions of a RNA. Each strand of the multifunctional siNA construct comprises a region having complementarity to the separate regions of the target nucleic acid molecule. The multifunctional siNA molecule is designed such that each strand of the siNA can be utilized by the RISC complex to initiate RNA interference mediated cleavage of its corresponding target region. These design parameters can include destabilization of each end of the siNA construct (see for example Schwarz et al., 2003, Cell, 115, 199-208). Such destabilization can be accomplished for example by using guanosine-cytidine base pairs, alternate base pairs (e.g., wobbles), or destabilizing chemically modified nucleotides at terminal nucleotide positions as is known in the art.

[0287] FIG. 22 shows a non-limiting example of parallel MAPK cascades that involve specific MAPK enzyme modules. Each of the MAPK/ERK, JNK and p38 cascades consists of a three-enzyme module that includes MEKK, MEK and an ERK or MAPK superfamily member. A variety of extracellular signals triggers initial events upon association with their respective cell surface receptors and this signal is then transmitted to the interior of the cell where it activates the appropriate cascades. The shaded area indicates those signaling molecules that become associated with the intracellular surface of the plasma membrane upon activation (figure adapted from Cobb and Schaefer, 1996, Promega Notes Magazine Number 59, page 37).

[0288] FIG. 23 shows a non-limiting example of reduction of p38 (MAPK 14) mRNA in A549 cells mediated by chemically modified siNAs that target p38 mRNA. A549 cells were transfected with 0.25 ug/well of lipid complexed with 25 nM siNA. Active siNA constructs (solid bars) comprising various stabilization chemistries (see Tables III and IV) were compared to untreated cells, matched chemistry irrelevant siNA control constructs (IC-1, IC-2), and cells transfected with lipid alone (transfection control). As shown in the figure, the siNA constructs significantly reduce p38 RNA expression.

[0289] FIG. 24 shows a non-limiting example of reduction of JNK1 mRNA in A549 cells mediated by chemically modified siNAs that target p38 mRNA. A549 cells were transfected with 0.25 ug/well of lipid complexed with 25 nM siNA. Active siNA constructs (solid bars) comprising various stabilization chemistries (see Tables III and IV) were compared to untreated cells, matched chemistry irrelevant siNA control constructs (IC-1, IC-2), and cells transfected with lipid alone (transfection control). As shown in the figure, the siNA constructs significantly reduce JNK1 RNA expression.

[0290] FIG. 25 shows a non-limiting example of reduction of c-JUN gene expression in HEPA1C1C7 cells using siNA constructs targeting c-JUN RNA. A549 cells were transfected with 0.25 ug/well of lipid complexed with 100 nM siNA. Active siNA constructs (solid bars) were compared to untreated cells, matched chemistry inverted control siNA constructs, and cells transfected with lipid alone (transfection control). As shown in FIG. 25, the active siNA constructs show significant reduction of c-JUN RNA expression compared to matched chemistry inverted controls, untreated cells, and transfection controls.

[0291] FIG. 26 shows a non-limiting example of reduction of ERK1 (MAPK 3) mRNA in A549 cells mediated by chemically modified siNAs that target ERK1 mRNA. A549 cells were transfected with 0.25 ug/well of lipid complexed with 25 nM siNA. Active siNA constructs (solid bars) comprising various stabilization chemistries (see Tables III and IV) were compared to untreated cells, matched chemistry irrelevant siNA control constructs (IC1, IC2), and cells transfected with lipid alone (transfection control). As shown in the figure, the siNA constructs significantly reduce ERK1 RNA expression.

### DETAILED DESCRIPTION OF THE INVENTION

Mechanism of Action of Nucleic Acid Molecules of the Invention

[0292] The discussion that follows discusses the proposed mechanism of RNA interference mediated by short interfering RNA as is presently known, and is not meant to be limiting and is not an admission of prior art. Applicant demonstrates herein that chemically-modified short interfering nucleic acids possess similar or improved capacity to mediate RNAi as do siRNA molecules and are expected to possess improved stability and activity in vivo; therefore, this discussion is not meant to be limiting only to siRNA and can be applied to siNA as a whole. By “improved capacity to mediate RNAi” or “improved RNAi activity” is meant to include RNAi activity measured in vitro and/or in vivo where the RNAi activity is a reflection of both the ability of the siNA to mediate RNAi and the stability of the siNAs of the invention. In this invention, the product of these activities can be increased in vitro and/or in vivo compared to an all RNA siRNA or a siNA containing a plurality of ribonucleotides. In some cases, the activity or stability of the siNA molecule can be decreased (i.e., less than ten-fold), but the overall activity of the siNA molecule is enhanced in vitro and/or in vivo.

[0293] RNA interference refers to the process of sequence specific post-transcriptional gene silencing in animals mediated by short interfering RNAs (siRNAs) (Fire et al., 1998, Nature, 391, 806). The corresponding process in plants is commonly referred to as post-transcriptional gene silencing or RNA silencing and is also referred to as quelling in fungi. The process of post-transcriptional gene silencing is thought to be an evolutionarily-conserved cellular defense mechanism used to prevent the expression of foreign genes which is commonly shared by diverse flora and phyla (Fire et al., 1999, Trends Genet., 15, 358). Such protection from foreign gene expression may have evolved in response to the production of double-stranded RNAs (dsRNAs) derived from viral infection or the random integration of transposon elements into a host genome via a cellular response that specifically destroys homologous single-stranded RNA or viral genomic RNA. The presence of dsRNA in cells triggers the RNAi response though a mechanism that has yet to be fully characterized. This mechanism appears to be different from the interferon response that results from dsRNA-mediated activation of protein kinase PKR and 2′,5′-oligoadenylate synthetase resulting in non-specific cleavage of mRNA by ribonuclease L.

[0294] The presence of long dsRNAs in cells stimulates the activity of a ribonuclease III enzyme referred to as Dicer. Dicer is involved in the processing of the dsRNA into short pieces of dsRNA known as short interfering RNAs (siRNAs) (Berstein et al., 2001, Nature, 409, 363). Short interfering RNAs derived from Dicer activity are typically about 21 to about 23 nucleotides in length and comprise about 19 base pair duplexes. Dicer has also been implicated in the excision of 21- and 22-nucleotide small temporal RNAs (stRNAs) from precursor RNA of conserved structure that are implicated in translational control (Hutvagner et al., 2001, Science, 293, 834). The RNAi response also features an endonuclease complex containing a siRNA, commonly referred to as an RNA-induced silencing complex (RISC), which mediates cleavage of single-stranded RNA having sequence homologous to the siRNA. Cleavage of the target RNA takes place in the middle of the region complementary to the guide sequence of the siRNA duplex (Elbashir et al., 2001, Genes Dev., 15, 188). In addition, RNA interference can also involve small RNA (e.g., micro-RNA or miRNA) mediated gene silencing, presumably though cellular mechanisms that regulate chromatin structure and thereby prevent transcription of target gene sequences (see for example Allshire, 2002, Science, 297, 1818-1819; Volpe et al., 2002, Science, 297, 1833-1837; Jenuwein, 2002, Science, 297, 2215-2218; and Hall et al., 2002, Science, 297, 2232-2237). As such, siNA molecules of the invention can be used to mediate gene silencing via interaction with RNA transcripts or alternately by interaction with particular gene sequences, wherein such interaction results in gene silencing either at the transcriptional level or post-transcriptional level.

[0295] RNAi has been studied in a variety of systems. Fire et al., 1998, Nature, 391, 806, were the first to observe RNAi in C. elegans. Wianny and Goetz, 1999, Nature Cell Biol., 2, 70, describe RNAi mediated by dsRNA in mouse embryos. Hammond et al., 2000, Nature, 404, 293, describe RNAi in Drosophila cells transfected with dsRNA. Elbashir et al., 2001, Nature, 411, 494, describe RNAi induced by introduction of duplexes of synthetic 21-nucleotide RNAs in cultured mammalian cells including human embryonic kidney and HeLa cells. Recent work in Drosophila embryonic lysates has revealed certain requirements for siRNA length, structure, chemical composition, and sequence that are essential to mediate efficient RNAi activity. These studies have shown that 21 nucleotide siRNA duplexes are most active when containing two 2-nucleotide 3′-terminal nucleotide overhangs. Furthermore, substitution of one or both siRNA strands with 2′-deoxy or 2′-O-methyl nucleotides abolishes RNAi activity, whereas substitution of 3′-terminal siRNA nucleotides with deoxy nucleotides was shown to be tolerated. Mismatch sequences in the center of the siRNA duplex were also shown to abolish RNAi activity. In addition, these studies also indicate that the position of the cleavage site in the target RNA is defined by the 5′-end of the siRNA guide sequence rather than the 3′-end (Elbashir et al., 2001, EMBO J, 20, 6877). Other studies have indicated that a 5′-phosphate on the target-complementary strand of a siRNA duplex is required for siRNA activity and that ATP is utilized to maintain the 5′-phosphate moiety on the siRNA (Nykanen et al., 2001, Cell, 107, 309); however, siRNA molecules lacking a 5′-phosphate are active when introduced exogenously, suggesting that 5′-phosphorylation of siRNA constructs may occur in vivo.

Synthesis of Nucleic Acid Molecules

[0296] Synthesis of nucleic acids greater than 100 nucleotides in length is difficult using automated methods, and the therapeutic cost of such molecules is prohibitive. In this invention, small nucleic acid motifs (“small” refers to nucleic acid motifs no more than 100 nucleotides in length, preferably no more than 80 nucleotides in length, and most preferably no more than 50 nucleotides in length; e.g., individual siNA oligonucleotide sequences or siNA sequences synthesized in tandem) are preferably used for exogenous delivery. The simple structure of these molecules increases the ability of the nucleic acid to invade targeted regions of protein and/or RNA structure. Exemplary molecules of the instant invention are chemically synthesized, and others can similarly be synthesized.

[0297] Oligonucleotides (e.g., certain modified oligonucleotides or portions of oligonucleotides lacking ribonucleotides) are synthesized using protocols known in the art, for example as described in Caruthers et al., 1992, Methods in Enzymology 211, 3-19, Thompson et al., International PCT Publication No. WO 99/54459, Wincott et al., 1995, Nucleic Acids Res. 23, 2677-2684, Wincott et al., 1997, Methods Mol. Bio., 74, 59, Brennan et al., 1998, Biotechnol Bioeng., 61, 33-45, and Brennan, U.S. Pat. No. 6,001,311. All of these references are incorporated herein by reference. The synthesis of oligonucleotides makes use of common nucleic acid protecting and coupling groups, such as dimethoxytrityl at the 5′-end, and phosphoramidites at the 3′-end. In a non-limiting example, small scale syntheses are conducted on a 394 Applied Biosystems, Inc. synthesizer using a 0.2 μmol scale protocol with a 2.5 min coupling step for 2′-O-methylated nucleotides and a 45 second coupling step for 2′-deoxy nucleotides or 2′-deoxy-2′-fluoro nucleotides. Table V outlines the amounts and the contact times of the reagents used in the synthesis cycle. Alternatively, syntheses at the 0.2 μmol scale can be performed on a 96-well plate synthesizer, such as the instrument produced by Protogene (Palo Alto, Calif.) with minimal modification to the cycle. A 33-fold excess (60 μL of 0.11 M=6.6 mmol) of 2′-O-methyl phosphoramidite and a 105-fold excess of S-ethyl tetrazole (60 μL of 0.25 M=15 μmol) can be used in each coupling cycle of 2′-O-methyl residues relative to polymer-bound 5′-hydroxyl. A 22-fold excess (40 μL of 0.11 M=4.4 μmol) of deoxy phosphoramidite and a 70-fold excess of S-ethyl tetrazole (40 μL of 0.25 M=10 μmol) can be used in each coupling cycle of deoxy residues relative to polymer-bound 5′-hydroxyl. Average coupling yields on the 394 Applied Biosystems, Inc. synthesizer, determined by colorimetric quantitation of the trityl fractions, are typically 97.5-99%. Other oligonucleotide synthesis reagents for the 394 Applied Biosystems, Inc. synthesizer include the following: detritylation solution is 3% TCA in methylene chloride (ABI); capping is performed with 16% N-methyl imidazole in THF (ABI) and 10% acetic anhydride/10% 2,6-lutidine in THF (ABI); and oxidation solution is 16.9 mM 12, 49 mM pyridine, 9% water in THF (PerSeptive Biosystems, Inc.). Burdick & Jackson Synthesis Grade acetonitrile is used directly from the reagent bottle. S-Ethyltetrazole solution (0.25 M in acetonitrile) is made up from the solid obtained from American International Chemical, Inc. Alternately, for the introduction of phosphorothioate linkages, Beaucage reagent (3H-1,2-Benzodithiol-3-one 1,1-dioxide, 0.05 M in acetonitrile) is used.

[0298] Deprotection of the DNA-based oligonucleotides is performed as follows: the polymer-bound trityl-on oligoribonucleotide is transferred to a 4 mL glass screw top vial and suspended in a solution of 40% aqueous methylamine (1 mL) at 65° C. for 10 minutes. After cooling to −20° C., the supernatant is removed from the polymer support. The support is washed three times with 1.0 mL of EtOH:MeCN:H2O/3:1:1, vortexed and the supernatant is then added to the first supernatant. The combined supernatants, containing the oligoribonucleotide, are dried to a white powder.

[0299] The method of synthesis used for RNA including certain siNA molecules of the invention follows the procedure as described in Usman et al., 1987, J. Am. Chem. Soc., 109, 7845; Scaringe et al., 1990, Nucleic Acids Res., 18, 5433; and Wincott et al., 1995, Nucleic Acids Res. 23, 2677-2684 Wincott et al., 1997, Methods Mol. Bio., 74, 59, and makes use of common nucleic acid protecting and coupling groups, such as dimethoxytrityl at the 5′-end, and phosphoramidites at the 3′-end. In a non-limiting example, small scale syntheses are conducted on a 394 Applied Biosystems, Inc. synthesizer using a 0.2 μmol scale protocol with a 7.5 min coupling step for alkylsilyl protected nucleotides and a 2.5 min coupling step for 2′-O-methylated nucleotides. Table V outlines the amounts and the contact times of the reagents used in the synthesis cycle. Alternatively, syntheses at the 0.2 μmol scale can be done on a 96-well plate synthesizer, such as the instrument produced by Protogene (Palo Alto, Calif.) with minimal modification to the cycle. A 33-fold excess (60 μL of 0.11 M=6.6 μmol) of 2′-O-methyl phosphoramidite and a 75-fold excess of S-ethyl tetrazole (60 μL of 0.25 M=15 μmol) can be used in each coupling cycle of 2′-O-methyl residues relative to polymer-bound 5′-hydroxyl. A 66-fold excess (120 μL of 0.11 M=13.2 μmol) of alkylsilyl (ribo) protected phosphoramidite and a 150-fold excess of S-ethyl tetrazole (120 μL of 0.25 M=30 μmol) can be used in each coupling cycle of ribo residues relative to polymer-bound 5′-hydroxyl. Average coupling yields on the 394 Applied Biosystems, Inc. synthesizer, determined by colorimetric quantitation of the trityl fractions, are typically 97.5-99%. Other oligonucleotide synthesis reagents for the 394 Applied Biosystems, Inc. synthesizer include the following: detritylation solution is 3% TCA in methylene chloride (ABI); capping is performed with 16% N-methyl imidazole in THF (ABI) and 10% acetic anhydride/10% 2,6-lutidine in THF (ABI); oxidation solution is 16.9 mM 12, 49 mM pyridine, 9% water in THF (PerSeptive Biosystems, Inc.). Burdick & Jackson Synthesis Grade acetonitrile is used directly from the reagent bottle. S-Ethyltetrazole solution (0.25 M in acetonitrile) is made up from the solid obtained from American International Chemical, Inc. Alternately, for the introduction of phosphorothioate linkages, Beaucage reagent (3H-1,2-Benzodithiol-3-one 1,1-dioxide0.05 M in acetonitrile) is used.

[0300] Deprotection of the RNA is performed using either a two-pot or one-pot protocol. For the two-pot protocol, the polymer-bound trityl-on oligoribonucleotide is transferred to a 4 mL glass screw top vial and suspended in a solution of 40% aq. methylamine (1 mL) at 65° C. for 10 min. After cooling to −20° C., the supernatant is removed from the polymer support. The support is washed three times with 1.0 mL of EtOH:MeCN:H2O/3:1:1, vortexed and the supernatant is then added to the first supernatant. The combined supernatants, containing the oligoribonucleotide, are dried to a white powder. The base deprotected oligoribonucleotide is resuspended in anhydrous TEA/HF/NMP solution (300 μL of a solution of 1.5 mL N-methylpyrrolidinone, 750 μL TEA and 1 mL TEA·3HF to provide a 1.4 M HF concentration) and heated to 65° C. After 1.5 h, the oligomer is quenched with 1.5 M NH₄HCO₃.

[0301] Alternatively, for the one-pot protocol, the polymer-bound trityl-on oligoribonucleotide is transferred to a 4 mL glass screw top vial and suspended in a solution of 33% ethanolic methylamine/DMSO: 1/1 (0.8 mL) at 65° C. for 15 minutes. The vial is brought to room temperature TEA·3HF (0.1 mL) is added and the vial is heated at 65° C. for 15 minutes. The sample is cooled at −20° C. and then quenched with 1.5 M NH₄HCO₃.

[0302] For purification of the trityl-on oligomers, the quenched NH₄HCO₃ solution is loaded onto a C-18 containing cartridge that had been prewashed with acetonitrile followed by 50 mM TEAA. After washing the loaded cartridge with water, the RNA is detritylated with 0.5% TFA for 13 minutes. The cartridge is then washed again with water, salt exchanged with 1 M NaCl and washed with water again. The oligonucleotide is then eluted with 30% acetonitrile.

[0303] The average stepwise coupling yields are typically >98% (Wincott et al., 1995 Nucleic Acids Res. 23, 2677-2684). Those of ordinary skill in the art will recognize that the scale of synthesis can be adapted to be larger or smaller than the example described above including but not limited to 96-well format.

[0304] Alternatively, the nucleic acid molecules of the present invention can be synthesized separately and joined together post-synthetically, for example, by ligation (Moore et al., 1992, Science 256, 9923; Draper et al., International PCT publication No. WO 93/23569; Shabarova et al., 1991, Nucleic Acids Research 19, 4247; Bellon et al., 1997, Nucleosides & Nucleotides, 16, 951; Bellon et al., 1997, Bioconjugate Chem. 8, 204), or by hybridization following synthesis and/or deprotection.

[0305] The siNA molecules of the invention can also be synthesized via a tandem synthesis methodology as described in Example 1 herein, wherein both siNA strands are synthesized as a single contiguous oligonucleotide fragment or strand separated by a cleavable linker which is subsequently cleaved to provide separate siNA fragments or strands that hybridize and permit purification of the siNA duplex. The linker can be a polynucleotide linker or a non-nucleotide linker. The tandem synthesis of siNA as described herein can be readily adapted to both multiwell/multiplate synthesis platforms such as 96 well or similarly larger multi-well platforms. The tandem synthesis of siNA as described herein can also be readily adapted to large scale synthesis platforms employing batch reactors, synthesis columns and the like.

[0306] A siNA molecule can also be assembled from two distinct nucleic acid strands or fragments wherein one fragment includes the sense region and the second fragment includes the antisense region of the RNA molecule.

[0307] The nucleic acid molecules of the present invention can be modified extensively to enhance stability by modification with nuclease resistant groups, for example, 2′-amino, 2′-C-allyl, 2′-fluoro, 2′-O-methyl, 2′-H (for a review see Usman and Cedergren, 1992, TIBS 17, 34; Usman et al., 1994, Nucleic Acids Symp. Ser. 31, 163). siNA constructs can be purified by gel electrophoresis using general methods or can be purified by high pressure liquid chromatography (HPLC; see Wincott et al., supra, the totality of which is hereby incorporated herein by reference) and re-suspended in water.

[0308] In another aspect of the invention, siNA molecules of the invention are expressed from transcription units inserted into DNA or RNA vectors. The recombinant vectors can be DNA plasmids or viral vectors. siNA expressing viral vectors can be constructed based on, but not limited to, adeno-associated virus, retrovirus, adenovirus, or alphavirus. The recombinant vectors capable of expressing the siNA molecules can be delivered as described herein, and persist in target cells. Alternatively, viral vectors can be used that provide for transient expression of siNA molecules.

Optimizing Activity of the Nucleic Acid Molecule of the Invention.

[0309] Chemically synthesizing nucleic acid molecules with modifications (base, sugar and/or phosphate) can prevent their degradation by serum ribonucleases, which can increase their potency (see e.g., Eckstein et al., International Publication No. WO 92/07065; Perrault et al., 1990 Nature 344, 565; Pieken et al., 1991, Science 253, 314; Usman and Cedergren, 1992, Trends in Biochem. Sci. 17, 334; Usman et al., International Publication No. WO 93/15187; and Rossi et al., International Publication No. WO 91/03162; Sproat, U.S. Pat. No. 5,334,711; Gold et al., U.S. Pat. No. 6,300,074; and Burgin et al., supra; all of which are incorporated by reference herein). All of the above references describe various chemical modifications that can be made to the base, phosphate and/or sugar moieties of the nucleic acid molecules described herein. Modifications that enhance their efficacy in cells, and removal of bases from nucleic acid molecules to shorten oligonucleotide synthesis times and reduce chemical requirements are desired.

[0310] There are several examples in the art describing sugar, base and phosphate modifications that can be introduced into nucleic acid molecules with significant enhancement in their nuclease stability and efficacy. For example, oligonucleotides are modified to enhance stability and/or enhance biological activity by modification with nuclease resistant groups, for example, 2′-amino, 2′-C-allyl, 2′-fluoro, 2′-O-methyl, 2′-O-allyl, 2′-H, nucleotide base modifications (for a review see Usman and Cedergren, 1992, TIBS. 17, 34; Usman et al., 1994, Nucleic Acids Symp. Ser. 31, 163; Burgin et al., 1996, Biochemistry, 35, 14090). Sugar modification of nucleic acid molecules have been extensively described in the art (see Eckstein et al., International Publication PCT No. WO 92/07065; Perrault et al. Nature, 1990, 344, 565-568; Pieken et al. Science, 1991, 253, 314-317; Usman and Cedergren, Trends in Biochem. Sci., 1992, 17, 334-339; Usman et al. International Publication PCT No. WO 93/15187; Sproat, U.S. Pat. No. 5,334,711 and Beigelman et al., 1995, J. Biol. Chem., 270, 25702; Beigelman et al., International PCT publication No. WO 97/26270; Beigelman et al., U.S. Pat. No. 5,716,824; Usman et al., U.S. Pat. No. 5,627,053; Woolf et al., International PCT Publication No. WO 98/13526; Thompson et al., U.S. Ser. No. 60/082,404 which was filed on Apr. 20, 1998; Karpeisky et al., 1998, Tetrahedron Lett., 39, 1131; Earnshaw and Gait, 1998, Biopolymers (Nucleic Acid Sciences), 48, 39-55; Verma and Eckstein, 1998, Annu. Rev. Biochem., 67, 99-134; and Burlina et al., 1997, Bioorg. Med. Chem., 5, 1999-2010; all of the references are hereby incorporated in their totality by reference herein). Such publications describe general methods and strategies to determine the location of incorporation of sugar, base and/or phosphate modifications and the like into nucleic acid molecules without modulating catalysis, and are incorporated by reference herein. In view of such teachings, similar modifications can be used as described herein to modify the siNA nucleic acid molecules of the instant invention so long as the ability of siNA to promote RNAi is cells is not significantly inhibited.

[0311] While chemical modification of oligonucleotide internucleotide linkages with phosphorothioate, phosphorodithioate, and/or 5′-methylphosphonate linkages improves stability, excessive modifications can cause some toxicity or decreased activity. Therefore, when designing nucleic acid molecules, the amount of these internucleotide linkages should be minimized. The reduction in the concentration of these linkages should lower toxicity, resulting in increased efficacy and higher specificity of these molecules.

[0312] Short interfering nucleic acid (siNA) molecules having chemical modifications that maintain or enhance activity are provided. Such a nucleic acid is also generally more resistant to nucleases than an unmodified nucleic acid. Accordingly, the in vitro and/or in vivo activity should not be significantly lowered. In cases in which modulation is the goal, therapeutic nucleic acid molecules delivered exogenously should optimally be stable within cells until translation of the target RNA has been modulated long enough to reduce the levels of the undesirable protein. This period of time varies between hours to days depending upon the disease state. Improvements in the chemical synthesis of RNA and DNA (Wincott et al., 1995, Nucleic Acids Res. 23, 2677; Caruthers et al., 1992, Methods in Enzymology 211, 3-19 (incorporated by reference herein)) have expanded the ability to modify nucleic acid molecules by introducing nucleotide modifications to enhance their nuclease stability, as described above.

[0313] In one embodiment, nucleic acid molecules of the invention include one or more (e.g., about 1, 2, 3, 4, 5, 6, 7, 8, 9, 10, or more) G-clamp nucleotides. A G-clamp nucleotide is a modified cytosine analog wherein the modifications confer the ability to hydrogen bond both Watson-Crick and Hoogsteen faces of a complementary guanine within a duplex, see for example Lin and Matteucci, 1998, J. Am. Chem. Soc., 120, 8531-8532. A single G-clamp analog substitution within an oligonucleotide can result in substantially enhanced helical thermal stability and mismatch discrimination when hybridized to complementary oligonucleotides. The inclusion of such nucleotides in nucleic acid molecules of the invention results in both enhanced affinity and specificity to nucleic acid targets, complementary sequences, or template strands. In another embodiment, nucleic acid molecules of the invention include one or more (e.g., about 1, 2, 3, 4, 5, 6, 7, 8, 9, 10, or more) LNA “locked nucleic acid” nucleotides such as a 2′,4′-C methylene bicyclo nucleotide (see for example Wengel et al., International PCT Publication No. WO 00/66604 and WO 99/14226).

[0314] In another embodiment, the invention features conjugates and/or complexes of siNA molecules of the invention. Such conjugates and/or complexes can be used to facilitate delivery of siNA molecules into a biological system, such as a cell. The conjugates and complexes provided by the instant invention can impart therapeutic activity by transferring therapeutic compounds across cellular membranes, altering the pharmacokinetics, and/or modulating the localization of nucleic acid molecules of the invention. The present invention encompasses the design and synthesis of novel conjugates and complexes for the delivery of molecules, including, but not limited to, small molecules, lipids, cholesterol, phospholipids, nucleosides, nucleotides, nucleic acids, antibodies, toxins, negatively charged polymers and other polymers, for example proteins, peptides, hormones, carbohydrates, polyethylene glycols, or polyamines, across cellular membranes. In general, the transporters described are designed to be used either individually or as part of a multi-component system, with or without degradable linkers. These compounds are expected to improve delivery and/or localization of nucleic acid molecules of the invention into a number of cell types originating from different tissues, in the presence or absence of serum (see Sullenger and Cech, U.S. Pat. No. 5,854,038). Conjugates of the molecules described herein can be attached to biologically active molecules via linkers that are biodegradable, such as biodegradable nucleic acid linker molecules.

[0315] The term “biodegradable linker” as used herein, refers to a nucleic acid or non-nucleic acid linker molecule that is designed as a biodegradable linker to connect one molecule to another molecule, for example, a biologically active molecule to a siNA molecule of the invention or the sense and antisense strands of a siNA molecule of the invention. The biodegradable linker is designed such that its stability can be modulated for a particular purpose, such as delivery to a particular tissue or cell type. The stability of a nucleic acid-based biodegradable linker molecule can be modulated by using various chemistries, for example combinations of ribonucleotides, deoxyribonucleotides, and chemically-modified nucleotides, such as 2′-O-methyl, 2′-fluoro, 2′-amino, 2′-O-amino, 2′-C-allyl, 2′-O-allyl, and other 2′-modified or base modified nucleotides. The biodegradable nucleic acid linker molecule can be a dimer, trimer, tetramer or longer nucleic acid molecule, for example, an oligonucleotide of about 2, 3, 4, 5, 6, 7, 8, 9, 10, 11, 12, 13, 14, 15, 16, 17, 18, 19, or 20 nucleotides in length, or can comprise a single nucleotide with a phosphorus-based linkage, for example, a phosphoramidate or phosphodiester linkage. The biodegradable nucleic acid linker molecule can also comprise nucleic acid backbone, nucleic acid sugar, or nucleic acid base modifications.

[0316] The term “biodegradable” as used herein, refers to degradation in a biological system, for example, enzymatic degradation or chemical degradation.

[0317] The term “biologically active molecule” as used herein refers to compounds or molecules that are capable of eliciting or modifying a biological response in a system. Non-limiting examples of biologically active siNA molecules either alone or in combination with other molecules contemplated by the instant invention include therapeutically active molecules such as antibodies, cholesterol, hormones, antivirals, peptides, proteins, chemotherapeutics, small molecules, vitamins, co-factors, nucleosides, nucleotides, oligonucleotides, enzymatic nucleic acids, antisense nucleic acids, triplex forming oligonucleotides, 2,5-A chimeras, siNA, dsRNA, allozymes, aptamers, decoys and analogs thereof. Biologically active molecules of the invention also include molecules capable of modulating the pharmacokinetics and/or pharmacodynamics of other biologically active molecules, for example, lipids and polymers such as polyamines, polyamides, polyethylene glycol and other polyethers.

[0318] The term “phospholipid” as used herein, refers to a hydrophobic molecule comprising at least one phosphorus group. For example, a phospholipid can comprise a phosphorus-containing group and saturated or unsaturated alkyl group, optionally substituted with OH, COOH, oxo, amine, or substituted or unsubstituted aryl groups.

[0319] Therapeutic nucleic acid molecules (e.g., siNA molecules) delivered exogenously optimally are stable within cells until reverse transcription of the RNA has been modulated long enough to reduce the levels of the RNA transcript. The nucleic acid molecules are resistant to nucleases in order to function as effective intracellular therapeutic agents. Improvements in the chemical synthesis of nucleic acid molecules described in the instant invention and in the art have expanded the ability to modify nucleic acid molecules by introducing nucleotide modifications to enhance their nuclease stability as described above.

[0320] In yet another embodiment, siNA molecules having chemical modifications that maintain or enhance enzymatic activity of proteins involved in RNAi are provided. Such nucleic acids are also generally more resistant to nucleases than unmodified nucleic acids. Thus, in vitro and/or in vivo the activity should not be significantly lowered.

[0321] Use of the nucleic acid-based molecules of the invention will lead to better treatments by affording the possibility of combination therapies (e.g., multiple siNA molecules targeted to different genes; nucleic acid molecules coupled with known small molecule modulators; or intermittent treatment with combinations of molecules, including different motifs and/or other chemical or biological molecules). The treatment of subjects with siNA molecules can also include combinations of different types of nucleic acid molecules, such as enzymatic nucleic acid molecules (ribozymes), allozymes, antisense, 2,5-A oligoadenylate, decoys, and aptamers.

[0322] In another aspect a siNA molecule of the invention comprises one or more 5′ and/or a 3′-cap structure, for example, on only the sense siNA strand, the antisense siNA strand, or both siNA strands.

[0323] By “cap structure” is meant chemical modifications, which have been incorporated at either terminus of the oligonucleotide (see, for example, Adamic et al., U.S. Pat. No. 5,998,203, incorporated by reference herein). These terminal modifications protect the nucleic acid molecule from exonuclease degradation, and may help in delivery and/or localization within a cell. The cap may be present at the 5′-terminus (5′-cap) or at the 3′-terminal (3′-cap) or may be present on both termini. In non-limiting examples, the 5′-cap includes, but is not limited to, glyceryl, inverted deoxy abasic residue (moiety); 4′,5′-methylene nucleotide; 1-(beta-D-erythrofuranosyl) nucleotide, 4′-thio nucleotide; carbocyclic nucleotide; 1,5-anhydrohexitol nucleotide; L-nucleotides; alpha-nucleotides; modified base nucleotide; phosphorodithioate linkage; threo-pentofuranosyl nucleotide; acyclic 3′,4′-seco nucleotide; acyclic 3,4-dihydroxybutyl nucleotide; acyclic 3,5-dihydroxypentyl nucleotide, 3′-3′-inverted nucleotide moiety; 3′-3′-inverted abasic moiety; 3′-2′-inverted nucleotide moiety; 3′-2′-inverted abasic moiety; 1,4-butanediol phosphate; 3′-phosphoramidate; hexylphosphate; aminohexyl phosphate; 3′-phosphate; 3′-phosphorothioate; phosphorodithioate; or bridging or non-bridging methylphosphonate moiety. Non-limiting examples of cap moieties are shown in FIG. 10.

[0324] Non-limiting examples of the 3′-cap include, but are not limited to, glyceryl, inverted deoxy abasic residue (moiety), 4′,5′-methylene nucleotide; 1-(beta-D-erythrofuranosyl) nucleotide; 4′-thio nucleotide, carbocyclic nucleotide; 5′-amino-alkyl phosphate; 1,3-diamino-2-propyl phosphate; 3-aminopropyl phosphate; 6-aminohexyl phosphate; 1,2-aminododecyl phosphate; hydroxypropyl phosphate; 1,5-anhydrohexitol nucleotide; L-nucleotide; alpha-nucleotide; modified base nucleotide; phosphorodithioate; threo-pentofuranosyl nucleotide; acyclic 3′,4′-seco nucleotide; 3,4-dihydroxybutyl nucleotide; 3,5-dihydroxypentyl nucleotide, 5′-5′-inverted nucleotide moiety; 5′-5′-inverted abasic moiety; 5′-phosphoramidate; 5′-phosphorothioate; 1,4-butanediol phosphate; 5′-amino; bridging and/or non-bridging 5′-phosphoramidate, phosphorothioate and/or phosphorodithioate, bridging or non bridging methylphosphonate and 5′-mercapto moieties (for more details see Beaucage and Iyer, 1993, Tetrahedron 49, 1925; incorporated by reference herein).

[0325] By the term “non-nucleotide” is meant any group or compound which can be incorporated into a nucleic acid chain in the place of one or more nucleotide units, including either sugar and/or phosphate substitutions, and allows the remaining bases to exhibit their enzymatic activity. The group or compound is abasic in that it does not contain a commonly recognized nucleotide base, such as adenosine, guanine, cytosine, uracil or thymine and therefore lacks a base at the 1′-position.

[0326] An “alkyl” group refers to a saturated aliphatic hydrocarbon, including straight-chain, branched-chain, and cyclic alkyl groups. Preferably, the alkyl group has 1 to 12 carbons. More preferably, it is a lower alkyl of from 1 to 7 carbons, more preferably 1 to 4 carbons. The alkyl group can be substituted or unsubstituted. When substituted the substituted group(s) is preferably, hydroxyl, cyano, alkoxy, ═O, ═S, NO₂ or N(CH₃)₂, amino, or SH. The term also includes alkenyl groups that are unsaturated hydrocarbon groups containing at least one carbon-carbon double bond, including straight-chain, branched-chain, and cyclic groups. Preferably, the alkenyl group has 1 to 12 carbons. More preferably, it is a lower alkenyl of from 1 to 7 carbons, more preferably 1 to 4 carbons. The alkenyl group may be substituted or unsubstituted. When substituted the substituted group(s) is preferably, hydroxyl, cyano, alkoxy, ═O, ═S, NO₂, halogen, N(CH₃)₂, amino, or SH. The term “alkyl” also includes alkynyl groups that have an unsaturated hydrocarbon group containing at least one carbon-carbon triple bond, including straight-chain, branched-chain, and cyclic groups. Preferably, the alkynyl group has 1 to 12 carbons. More preferably, it is a lower alkynyl of from 1 to 7 carbons, more preferably 1 to 4 carbons. The alkynyl group may be substituted or unsubstituted. When substituted the substituted group(s) is preferably, hydroxyl, cyano, alkoxy, ═O, ═S, NO₂ or N(CH₃)₂, amino or SH.

[0327] Such alkyl groups can also include aryl, alkylaryl, carbocyclic aryl, heterocyclic aryl, amide and ester groups. An “aryl” group refers to an aromatic group that has at least one ring having a conjugated pi electron system and includes carbocyclic aryl, heterocyclic aryl and biaryl groups, all of which may be optionally substituted. The preferred substituent(s) of aryl groups are halogen, trihalomethyl, hydroxyl, SH, OH, cyano, alkoxy, alkyl, alkenyl, alkynyl, and amino groups. An “alkylaryl” group refers to an alkyl group (as described above) covalently joined to an aryl group (as described above). Carbocyclic aryl groups are groups wherein the ring atoms on the aromatic ring are all carbon atoms. The carbon atoms are optionally substituted. Heterocyclic aryl groups are groups having from 1 to 3 heteroatoms as ring atoms in the aromatic ring and the remainder of the ring atoms are carbon atoms. Suitable heteroatoms include oxygen, sulfur, and nitrogen, and include furanyl, thienyl, pyridyl, pyrrolyl, N-lower alkyl pyrrolo, pyrimidyl, pyrazinyl, imidazolyl and the like, all optionally substituted. An “amide” refers to an —C(O)—NH—R, where R is either alkyl, aryl, alkylaryl or hydrogen. An “ester” refers to an —C(O)—OR′, where R is either alkyl, aryl, alkylaryl or hydrogen.

[0328] By “nucleotide” as used herein is as recognized in the art to include natural bases (standard), and modified bases well known in the art. Such bases are generally located at the 1′ position of a nucleotide sugar moiety. Nucleotides generally comprise a base, sugar and a phosphate group. The nucleotides can be unmodified or modified at the sugar, phosphate and/or base moiety, (also referred to interchangeably as nucleotide analogs, modified nucleotides, non-natural nucleotides, non-standard nucleotides and other; see, for example, Usman and McSwiggen, supra; Eckstein et al., International PCT Publication No. WO 92/07065; Usman et al., International PCT Publication No. WO 93/15187; Uhlman & Peyman, supra, all are hereby incorporated by reference herein). There are several examples of modified nucleic acid bases known in the art as summarized by Limbach et al., 1994, Nucleic Acids Res. 22, 2183. Some of the non-limiting examples of base modifications that can be introduced into nucleic acid molecules include, inosine, purine, pyridin-4-one, pyridin-2-one, phenyl, pseudouracil, 2, 4, 6-trimethoxy benzene, 3-methyl uracil, dihydrouridine, naphthyl, aminophenyl, 5-alkylcytidines (e.g., 5-methylcytidine), 5-alkyluridines (e.g., ribothymidine), 5-halouridine (e.g., 5-bromouridine) or 6-azapyrimidines or 6-alkylpyrimidines (e.g. 6-methyluridine), propyne, and others (Burgin et al., 1996, Biochemistry, 35, 14090; Uhlman & Peyman, supra). By “modified bases” in this aspect is meant nucleotide bases other than adenine, guanine, cytosine and uracil at 1′ position or their equivalents.

[0329] In one embodiment, the invention features modified siNA molecules, with phosphate backbone modifications comprising one or more phosphorothioate, phosphorodithioate, methylphosphonate, phosphotriester, morpholino, amidate carbamate, carboxymethyl, acetamidate, polyamide, sulfonate, sulfonamide, sulfamate, formacetal, thioformacetal, and/or alkylsilyl, substitutions. For a review of oligonucleotide backbone modifications, see Hunziker and Leumann, 1995, Nucleic Acid Analogues: Synthesis and Properties, in Modern Synthetic Methods, VCH, 331-417, and Mesmaeker et al., 1994, Novel Backbone Replacements for Oligonucleotides, in Carbohydrate Modifications in Antisense Research, ACS, 24-39.

[0330] By “abasic” is meant sugar moieties lacking a base or having other chemical groups in place of a base at the 1′ position, see for example Adamic et al., U.S. Pat. No. 5,998,203.

[0331] By “unmodified nucleoside” is meant one of the bases adenine, cytosine, guanine, thymine, or uracil joined to the 1′ carbon of β-D-ribo-furanose.

[0332] By “modified nucleoside” is meant any nucleotide base which contains a modification in the chemical structure of an unmodified nucleotide base, sugar and/or phosphate. Non-limiting examples of modified nucleotides are shown by Formulae I-VII and/or other modifications described herein.

[0333] In connection with 2′-modified nucleotides as described for the present invention, by “amino” is meant 2′-NH₂ or 2′-O—NH₂, which can be modified or unmodified. Such modified groups are described, for example, in Eckstein et al., U.S. Pat. No. 5,672,695 and Matulic-Adamic et al., U.S. Pat. No. 6,248,878, which are both incorporated by reference in their entireties.

[0334] Various modifications to nucleic acid siNA structure can be made to enhance the utility of these molecules. Such modifications will enhance shelf-life, half-life in vitro, stability, and ease of introduction of such oligonucleotides to the target site, e.g., to enhance penetration of cellular membranes, and confer the ability to recognize and bind to targeted cells.

Administration of Nucleic Acid Molecules

[0335] A siNA molecule of the invention can be adapted for use to prevent or treat cancer, inflammatory, autoimmune, neuroligic, ocular, respiratory, allergic, and/or proliferative diseases, conditions, or disorders, and/or any other trait, disease, disorder or condition that is related to or will respond to the levels of MAP kinase in a cell or tissue, alone or in combination with other therapies. For example, a siNA molecule can comprise a delivery vehicle, including liposomes, for administration to a subject, carriers and diluents and their salts, and/or can be present in pharmaceutically acceptable formulations. Methods for the delivery of nucleic acid molecules are described in Akhtar et al., 1992, Trends Cell Bio., 2, 139; Delivery Strategies for Antisense Oligonucleotide Therapeutics, ed. Akhtar, 1995, Maurer et al., 1999, Mol. Membr. Biol., 16, 129-140; Hofland and Huang, 1999, Handb. Exp. Pharmacol., 137, 165-192; and Lee et al., 2000, ACS Symp. Ser., 752, 184-192, all of which are incorporated herein by reference. Beigelman et al., U.S. Pat. No. 6,395,713 and Sullivan et al., PCT WO 94/02595 further describe the general methods for delivery of nucleic acid molecules. These protocols can be utilized for the delivery of virtually any nucleic acid molecule. Nucleic acid molecules can be administered to cells by a variety of methods known to those of skill in the art, including, but not restricted to, encapsulation in liposomes, by iontophoresis, or by incorporation into other vehicles, such as biodegradable polymers, hydrogels, cyclodextrins (see for example Gonzalez et al., 1999, Bioconjugate Chem., 10, 1068-1074; Wang et al., International PCT publication Nos. WO 03/47518 and WO 03/46185), poly(lactic-co-glycolic)acid (PLGA) and PLCA microspheres (see for example U.S. Pat. No. 6,447,796 and U.S. Patent Application Publication No. U.S. 2002130430), biodegradable nanocapsules, and bioadhesive microspheres, or by proteinaceous vectors (O'Hare and Normand, International PCT Publication No. WO 00/53722). Alternatively, the nucleic acid/vehicle combination is locally delivered by direct injection or by use of an infusion pump. Direct injection of the nucleic acid molecules of the invention, whether subcutaneous, intramuscular, or intradermal, can take place using standard needle and syringe methodologies, or by needle-free technologies such as those described in Conry et al., 1999, Clin. Cancer Res., 5, 2330-2337 and Barry et al., International PCT Publication No. WO 99/31262. The molecules of the instant invention can be used as pharmaceutical agents. Pharmaceutical agents prevent, modulate the occurrence, or treat (alleviate a symptom to some extent, preferably all of the symptoms) of a disease state in a subject.

[0336] In another embodiment, the nucleic acid molecules of the invention can also be formulated or complexed with polyethyleneimine and derivatives thereof, such as polyethyleneimine-polyethyleneglycol-N-acetylgalactosamine (PEI-PEG-GAL) or polyethyleneimine-polyethyleneglycol-tri-N-acetylgalactosamine (PEI-PEG-triGAL) derivatives. In one embodiment, the nucleic acid molecules of the invention are formulated as described in U.S. Patent Application Publication No. 20030077829, incorporated by reference herein in its entirety.

[0337] In one embodiment, a siNA molecule of the invention is complexed with membrane disruptive agents such as those described in U.S. Patent Application Publication No. 20010007666, incorporated by reference herein in its entirety including the drawings. In another embodiment, the membrane disruptive agent or agents and the siNA molecule are also complexed with a cationic lipid or helper lipid molecule, such as those lipids described in U.S. Pat. No. 6,235,310, incorporated by reference herein in its entirety including the drawings.

[0338] In one embodiment, a siNA molecule of the invention is complexed with delivery systems as described in U.S. Patent Application Publication No. 2003077829 and International PCT Publication Nos. WO 00/03683 and WO 02/087541, all incorporated by reference herein in their entirety including the drawings.

[0339] In one embodiment, the nucleic acid molecules of the invention are administered via pulmonary delivery, such as by inhalation of an aerosol or spray dried formulation administered by an inhalation device or nebulizer, providing rapid local uptake of the nucleic acid molecules into relevant pulmonary tissues. Solid particulate compositions containing respirable dry particles of micronized nucleic acid compositions can be prepared by grinding dried or lyophilized nucleic acid compositions, and then passing the micronized composition through, for example, a 400 mesh screen to break up or separate out large agglomerates. A solid particulate composition comprising the nucleic acid compositions of the invention can optionally contain a dispersant which serves to facilitate the formation of an aerosol as well as other therapeutic compounds. A suitable dispersant is lactose, which can be blended with the nucleic acid compound in any suitable ratio, such as a 1 to 1 ratio by weight.

[0340] Aerosols of liquid particles comprising a nucleic acid composition of the invention can be produced by any suitable means, such as with a nebulizer (see for example U.S. Pat. No. 4,501,729). Nebulizers are commercially available devices which transform solutions or suspensions of an active ingredient into a therapeutic aerosol mist either by means of acceleration of a compressed gas, typically air or oxygen, through a narrow venturi orifice or by means of ultrasonic agitation. Suitable formulations for use in nebulizers comprise the active ingredient in a liquid carrier in an amount of up to 40% w/w preferably less than 20% w/w of the formulation. The carrier is typically water or a dilute aqueous alcoholic solution, preferably made isotonic with body fluids by the addition of, for example, sodium chloride or other suitable salts. Optional additives include preservatives if the formulation is not prepared sterile, for example, methyl hydroxybenzoate, anti-oxidants, flavorings, volatile oils, buffering agents and emulsifiers and other formulation surfactants. The aerosols of solid particles comprising the active composition and surfactant can likewise be produced with any solid particulate aerosol generator. Aerosol generators for administering solid particulate therapeutics to a subject produce particles which are respirable, as explained above, and generate a volume of aerosol containing a predetermined metered dose of a therapeutic composition at a rate suitable for human administration. One illustrative type of solid particulate aerosol generator is an insufflator. Suitable formulations for administration by insufflation include finely comminuted powders which can be delivered by means of an insufflator. In the insufflator, the powder, e.g., a metered dose thereof effective to carry out the treatments described herein, is contained in capsules or cartridges, typically made of gelatin or plastic, which are either pierced or opened in situ and the powder delivered by air drawn through the device upon inhalation or by means of a manually-operated pump. The powder employed in the insufflator consists either solely of the active ingredient or of a powder blend comprising the active ingredient, a suitable powder diluent, such as lactose, and an optional surfactant. The active ingredient typically comprises from 0.1 to 100 w/w of the formulation. A second type of illustrative aerosol generator comprises a metered dose inhaler. Metered dose inhalers are pressurized aerosol dispensers, typically containing a suspension or solution formulation of the active ingredient in a liquified propellant. During use these devices discharge the formulation through a valve adapted to deliver a metered volume to produce a fine particle spray containing the active ingredient. Suitable propellants include certain chlorofluorocarbon compounds, for example, dichlorodifluoromethane, trichlorofluoromethane, dichlorotetrafluoroethane and mixtures thereof. The formulation can additionally contain one or more co-solvents, for example, ethanol, emulsifiers and other formulation surfactants, such as oleic acid or sorbitan trioleate, anti-oxidants and suitable flavoring agents. Other methods for pulmonary delivery are described in, for example U.S. Patent Application No. 20040037780, and U.S. Pat. Nos. 6,592,904; 6,582,728; 6,565,885.

[0341] In one embodiment, a compound, molecule, or composition for the treatment of ocular diseases, disorders and/or conditions (e.g., macular degeneration, diabetic retinopathy etc.) is administered to a subject intraocularly or by intraocular means. In another embodiment, a compound, molecule, or composition for the treatment of ocular conditions (e.g., macular degeneration, diabetic retinopathy etc.) is administered to a subject periocularly or by periocular means (see for example Ahlheim et al., International PCT publication No. WO 03/24420). In one embodiment, a siNA molecule and/or formulation or composition thereof is administered to a subject intraocularly or by intraocular means. In another embodiment, a siNA molecule and/or formualtion or composition thereof is administered to a subject periocularly or by periocular means. Periocular administration generally provides a less invasive approach to administering siNA molecules and formualtion or composition thereof to a subject (see for example Ahlheim et al., International PCT publication No. WO 03/24420). The use of periocular administraction also minimizes the risk of retinal detachment, allows for more frequent dosing or administration, provides a clinically relevant route of administration for macular degeneration and other optic conditions, and also provides the possiblilty of using resevoirs (e.g., implants, pumps or other devices) for drug delivery.

[0342] In addition, the invention features the use of methods to deliver the nucleic acid molecules of the instant invention to the central nervous system and/or peripheral nervous system. Experiments have demonstrated the efficient in vivo uptake of nucleic acids by neurons. As an example of local administration of nucleic acids to nerve cells, Sommer et al., 1998, Antisense Nuc. Acid Drug Dev., 8, 75, describe a study in which a 15mer phosphorothioate antisense nucleic acid molecule to c-fos is administered to rats via microinjection into the brain. Antisense molecules labeled with tetramethylrhodamine-isothiocyanate (TRITC) or fluorescein isothiocyanate (FITC) were taken up by exclusively by neurons thirty minutes post-injection. A diffuse cytoplasmic staining and nuclear staining was observed in these cells. As an example of systemic administration of nucleic acid to nerve cells, Epa et al., 2000, Antisense Nuc. Acid Drug Dev., 10, 469, describe an in vivo mouse study in which beta-cyclodextrin-adamantane-oligonucleotide conjugates were used to target the p75 neurotrophin receptor in neuronally differentiated PC12 cells. Following a two week course of IP administration, pronounced uptake of p75 neurotrophin receptor antisense was observed in dorsal root ganglion (DRG) cells. In addition, a marked and consistent down-regulation of p75 was observed in DRG neurons. Additional approaches to the targeting of nucleic acid to neurons are described in Broaddus et al., 1998, J. Neurosurg., 88(4), 734; Karle et al., 1997, Eur. J. Pharmocol., 340(2/3), 153; Bannai et al., 1998, Brain Research, 784(1,2), 304; Rajakumar et al., 1997, Synapse, 26(3), 199; Wu-pong et al., 1999, BioPharm, 12(1), 32; Bannai et al., 1998, Brain Res. Protoc., 3(1), 83; Simantov et al., 1996, Neuroscience, 74(1), 39. Nucleic acid molecules of the invention are therefore amenable to delivery to and uptake by cells that express repeat expansion allelic variants for modulation of RE gene expression. The delivery of nucleic acid molecules of the invention, targeting RE is provided by a variety of different strategies. Traditional approaches to CNS delivery that can be used include, but are not limited to, intrathecal and intracerebroventricular administration, implantation of catheters and pumps, direct injection or perfusion at the site of injury or lesion, injection into the brain arterial system, or by chemical or osmotic opening of the blood-brain barrier. Other approaches can include the use of various transport and carrier systems, for example though the use of conjugates and biodegradable polymers. Furthermore, gene therapy approaches, for example as described in Kaplitt et al., U.S. Pat. No. 6,180,613 and Davidson, WO 04/013280, can be used to express nucleic acid molecules in the CNS.

[0343] In one embodiment, delivery systems of the invention include, for example, aqueous and nonaqueous gels, creams, multiple emulsions, microemulsions, liposomes, ointments, aqueous and nonaqueous solutions, lotions, aerosols, hydrocarbon bases and powders, and can contain excipients such as solubilizers, permeation enhancers (e.g., fatty acids, fatty acid esters, fatty alcohols and amino acids), and hydrophilic polymers (e.g., polycarbophil and polyvinylpyrolidone). In one embodiment, the pharmaceutically acceptable carrier is a liposome or a transdermal enhancer. Examples of liposomes which can be used in this invention include the following: (1) CellFectin, 1:1.5 (M/M) liposome formulation of the cationic lipid N,NI,NII,NIII-tetramethyl-N,NI,NII,NIII-tetrapalmit-y-spermine and dioleoyl phosphatidylethanolamine (DOPE) (GIBCO BRL); (2) Cytofectin GSV, 2:1 (M/M) liposome formulation of a cationic lipid and DOPE (Glen Research); (3) DOTAP (N-[1-(2,3-dioleoyloxy)-N,N,N-tri-methyl-ammoniummethylsulfate) (Boehringer Manheim); and (4) Lipofectamine, 3:1 (M/M) liposome formulation of the polycationic lipid DOSPA and the neutral lipid DOPE (GIBCO BRL).

[0344] In one embodiment, delivery systems of the invention include patches, tablets, suppositories, pessaries, gels and creams, and can contain excipients such as solubilizers and enhancers (e.g., propylene glycol, bile salts and amino acids), and other vehicles (e.g., polyethylene glycol, fatty acid esters and derivatives, and hydrophilic polymers such as hydroxypropylmethylcellulose and hyaluronic acid).

[0345] In one embodiment, siNA molecules of the invention are formulated or complexed with polyethylenimine (e.g., linear or branched PEI) and/or polyethylenimine derivatives, including for example grafted PEIs such as galactose PEI, cholesterol PEI, antibody derivatized PEI, and polyethylene glycol PEI (PEG-PEI) derivatives thereof (see for example Ogris et al., 2001, AAPA PharmSci, 3, 1-11; Furgeson et al., 2003, Bioconjugate Chem., 14, 840-847; Kunath et al., 2002, Phramaceutical Research, 19, 810-817; Choi et al., 2001, Bull. Korean Chem. Soc., 22, 46-52; Bettinger et al., 1999, Bioconjugate Chem., 10, 558-561; Peterson et al., 2002, Bioconjugate Chem., 13, 845-854; Erbacher et al., 1999, Journal of Gene Medicine Preprint, 1, 1-18; Godbey et al., 1999., PNAS USA, 96, 5177-5181; Godbey et al., 1999, Journal of Controlled Release, 60, 149-160; Diebold et al., 1999, Journal of Biological Chemistry, 274, 19087-19094; Thomas and Klibanov, 2002, PNAS USA, 99, 14640-14645; and Sagara, U.S. Pat. No. 6,586,524, incorporated by reference herein.

[0346] In one embodiment, a siNA molecule of the invention comprises a bioconjugate, for example a nucleic acid conjugate as described in Vargeese et al., U.S. Ser. No. 10/427,160, filed Apr. 30, 2003; U.S. Pat. No. 6,528,631; U.S. Pat. No. 6,335,434; U.S. Pat. No. 6,235,886; U.S. Pat. No. 6,153,737; U.S. Pat. No. 5,214,136; U.S. Pat. No. 5,138,045, all incorporated by reference herein.

[0347] Thus, the invention features a pharmaceutical composition comprising one or more nucleic acid(s) of the invention in an acceptable carrier, such as a stabilizer, buffer, and the like. The polynucleotides of the invention can be administered (e.g., RNA, DNA or protein) and introduced to a subject by any standard means, with or without stabilizers, buffers, and the like, to form a pharmaceutical composition. When it is desired to use a liposome delivery mechanism, standard protocols for formation of liposomes can be followed. The compositions of the present invention can also be formulated and used as creams, gels, sprays, oils and other suitable compositions for topical, dermal, or transdermal administration as is known in the art.

[0348] The present invention also includes pharmaceutically acceptable formulations of the compounds described. These formulations include salts of the above compounds, e.g., acid addition salts, for example, salts of hydrochloric, hydrobromic, acetic acid, and benzene sulfonic acid.

[0349] A pharmacological composition or formulation refers to a composition or formulation in a form suitable for administration, e.g., systemic or local administration, into a cell or subject, including for example a human. Suitable forms, in part, depend upon the use or the route of entry, for example oral, transdermal, or by injection. Such forms should not prevent the composition or formulation from reaching a target cell (i.e., a cell to which the negatively charged nucleic acid is desirable for delivery). For example, pharmacological compositions injected into the blood stream should be soluble. Other factors are known in the art, and include considerations such as toxicity and forms that prevent the composition or formulation from exerting its effect.

[0350] In one embodiment, siNA molecules of the invention are administered to a subject by systemic administration in a pharmaceutically acceptable composition or formulation. By “systemic administration” is meant in vivo systemic absorption or accumulation of drugs in the blood stream followed by distribution throughout the entire body. Administration routes that lead to systemic absorption include, without limitation: intravenous, subcutaneous, intraperitoneal, inhalation, oral, intrapulmonary and intramuscular. Each of these administration routes exposes the siNA molecules of the invention to an accessible diseased tissue. The rate of entry of a drug into the circulation has been shown to be a function of molecular weight or size. The use of a liposome or other drug carrier comprising the compounds of the instant invention can potentially localize the drug, for example, in certain tissue types, such as the tissues of the reticular endothelial system (RES). A liposome formulation that can facilitate the association of drug with the surface of cells, such as, lymphocytes and macrophages is also useful. This approach can provide enhanced delivery of the drug to target cells by taking advantage of the specificity of macrophage and lymphocyte immune recognition of abnormal cells.

[0351] By “pharmaceutically acceptable formulation” or “pharmaceutically acceptable composition” is meant, a composition or formulation that allows for the effective distribution of the nucleic acid molecules of the instant invention in the physical location most suitable for their desired activity. Non-limiting examples of agents suitable for formulation with the nucleic acid molecules of the instant invention include: P-glycoprotein inhibitors (such as Pluronic P85),; biodegradable polymers, such as poly (DL-lactide-coglycolide) microspheres for sustained release delivery (Emerich, D F et al, 1999, Cell Transplant, 8, 47-58); and loaded nanoparticles, such as those made of polybutylcyanoacrylate. Other non-limiting examples of delivery strategies for the nucleic acid molecules of the instant invention include material described in Boado et al., 1998, J. Pharm. Sci., 87, 1308-1315; Tyler et al., 1999, FEBS Lett., 421, 280-284; Pardridge et al., 1995, PNAS USA., 92, 5592-5596; Boado, 1995, Adv. Drug Delivery Rev., 15, 73-107; Aldrian-Herrada et al., 1998, Nucleic Acids Res., 26, 4910-4916; and Tyler et al., 1999, PNAS USA., 96, 7053-7058.

[0352] The invention also features the use of the composition comprising surface-modified liposomes containing poly (ethylene glycol) lipids (PEG-modified, or long-circulating liposomes or stealth liposomes). These formulations offer a method for increasing the accumulation of drugs in target tissues. This class of drug carriers resists opsonization and elimination by the mononuclear phagocytic system (MPS or RES), thereby enabling longer blood circulation times and enhanced tissue exposure for the encapsulated drug (Lasic et al. Chem. Rev. 1995, 95, 2601-2627; Ishiwata et al., Chem. Pharm. Bull. 1995, 43, 1005-1011). Such liposomes have been shown to accumulate selectively in tumors, presumably by extravasation and capture in the neovascularized target tissues (Lasic et al., Science 1995, 267, 1275-1276; Oku et al.,1995, Biochim. Biophys. Acta, 1238, 86-90). The long-circulating liposomes enhance the pharmacokinetics and pharmacodynamics of DNA and RNA, particularly compared to conventional cationic liposomes which are known to accumulate in tissues of the MPS (Liu et al., J. Biol. Chem. 1995, 42, 24864-24870; Choi et al., International PCT Publication No. WO 96/10391; Ansell et al., International PCT Publication No. WO 96/10390; Holland et al., International PCT Publication No. WO 96/10392). Long-circulating liposomes are also likely to protect drugs from nuclease degradation to a greater extent compared to cationic liposomes, based on their ability to avoid accumulation in metabolically aggressive MPS tissues such as the liver and spleen.

[0353] The present invention also includes compositions prepared for storage or administration that include a pharmaceutically effective amount of the desired compounds in a pharmaceutically acceptable carrier or diluent. Acceptable carriers or diluents for therapeutic use are well known in the pharmaceutical art, and are described, for example, in Remington's Pharmaceutical Sciences, Mack Publishing Co. (A. R. Gennaro edit. 1985), hereby incorporated by reference herein. For example, preservatives, stabilizers, dyes and flavoring agents can be provided. These include sodium benzoate, sorbic acid and esters of p-hydroxybenzoic acid. In addition, antioxidants and suspending agents can be used.

[0354] A pharmaceutically effective dose is that dose required to prevent, inhibit the occurrence, or treat (alleviate a symptom to some extent, preferably all of the symptoms) of a disease state. The pharmaceutically effective dose depends on the type of disease, the composition used, the route of administration, the type of mammal being treated, the physical characteristics of the specific mammal under consideration, concurrent medication, and other factors that those skilled in the medical arts will recognize. Generally, an amount between 0.1 mg/kg and 100 mg/kg body weight/day of active ingredients is administered dependent upon potency of the negatively charged polymer.

[0355] The nucleic acid molecules of the invention and formulations thereof can be administered orally, topically, parenterally, by inhalation or spray, or rectally in dosage unit formulations containing conventional non-toxic pharmaceutically acceptable carriers, adjuvants and/or vehicles. The term parenteral as used herein includes percutaneous, subcutaneous, intravascular (e.g., intravenous), intramuscular, or intrathecal injection or infusion techniques and the like. In addition, there is provided a pharmaceutical formulation comprising a nucleic acid molecule of the invention and a pharmaceutically acceptable carrier. One or more nucleic acid molecules of the invention can be present in association with one or more non-toxic pharmaceutically acceptable carriers and/or diluents and/or adjuvants, and if desired other active ingredients. The pharmaceutical compositions containing nucleic acid molecules of the invention can be in a form suitable for oral use, for example, as tablets, troches, lozenges, aqueous or oily suspensions, dispersible powders or granules, emulsion, hard or soft capsules, or syrups or elixirs.

[0356] Compositions intended for oral use can be prepared according to any method known to the art for the manufacture of pharmaceutical compositions and such compositions can contain one or more such sweetening agents, flavoring agents, coloring agents or preservative agents in order to provide pharmaceutically elegant and palatable preparations. Tablets contain the active ingredient in admixture with non-toxic pharmaceutically acceptable excipients that are suitable for the manufacture of tablets. These excipients can be, for example, inert diluents; such as calcium carbonate, sodium carbonate, lactose, calcium phosphate or sodium phosphate; granulating and disintegrating agents, for example, corn starch, or alginic acid; binding agents, for example starch, gelatin or acacia; and lubricating agents, for example magnesium stearate, stearic acid or talc. The tablets can be uncoated or they can be coated by known techniques. In some cases such coatings can be prepared by known techniques to delay disintegration and absorption in the gastrointestinal tract and thereby provide a sustained action over a longer period. For example, a time delay material such as glyceryl monosterate or glyceryl distearate can be employed.

[0357] Formulations for oral use can also be presented as hard gelatin capsules wherein the active ingredient is mixed with an inert solid diluent, for example, calcium carbonate, calcium phosphate or kaolin, or as soft gelatin capsules wherein the active ingredient is mixed with water or an oil medium, for example peanut oil, liquid paraffin or olive oil.

[0358] Aqueous suspensions contain the active materials in a mixture with excipients suitable for the manufacture of aqueous suspensions. Such excipients are suspending agents, for example sodium carboxymethylcellulose, methylcellulose, hydropropyl-methylcellulose, sodium alginate, polyvinylpyrrolidone, gum tragacanth and gum acacia; dispersing or wetting agents can be a naturally-occurring phosphatide, for example, lecithin, or condensation products of an alkylene oxide with fatty acids, for example polyoxyethylene stearate, or condensation products of ethylene oxide with long chain aliphatic alcohols, for example heptadecaethyleneoxycetanol, or condensation products of ethylene oxide with partial esters derived from fatty acids and a hexitol such as polyoxyethylene sorbitol monooleate, or condensation products of ethylene oxide with partial esters derived from fatty acids and hexitol anhydrides, for example polyethylene sorbitan monooleate. The aqueous suspensions can also contain one or more preservatives, for example ethyl, or n-propyl p-hydroxybenzoate, one or more coloring agents, one or more flavoring agents, and one or more sweetening agents, such as sucrose or saccharin.

[0359] Oily suspensions can be formulated by suspending the active ingredients in a vegetable oil, for example arachis oil, olive oil, sesame oil or coconut oil, or in a mineral oil such as liquid paraffin. The oily suspensions can contain a thickening agent, for example beeswax, hard paraffin or cetyl alcohol. Sweetening agents and flavoring agents can be added to provide palatable oral preparations. These compositions can be preserved by the addition of an anti-oxidant such as ascorbic acid

[0360] Dispersible powders and granules suitable for preparation of an aqueous suspension by the addition of water provide the active ingredient in admixture with a dispersing or wetting agent, suspending agent and one or more preservatives. Suitable dispersing or wetting agents or suspending agents are exemplified by those already mentioned above. Additional excipients, for example sweetening, flavoring and coloring agents, can also be present.

[0361] Pharmaceutical compositions of the invention can also be in the form of oil-in-water emulsions. The oily phase can be a vegetable oil or a mineral oil or mixtures of these. Suitable emulsifying agents can be naturally-occurring gums, for example gum acacia or gum tragacanth, naturally-occurring phosphatides, for example soy bean, lecithin, and esters or partial esters derived from fatty acids and hexitol, anhydrides, for example sorbitan monooleate, and condensation products of the said partial esters with ethylene oxide, for example polyoxyethylene sorbitan monooleate. The emulsions can also contain sweetening and flavoring agents.

[0362] Syrups and elixirs can be formulated with sweetening agents, for example glycerol, propylene glycol, sorbitol, glucose or sucrose. Such formulations can also contain a demulcent, a preservative and flavoring and coloring agents. The pharmaceutical compositions can be in the form of a sterile injectable aqueous or oleaginous suspension. This suspension can be formulated according to the known art using those suitable dispersing or wetting agents and suspending agents that have been mentioned above. The sterile injectable preparation can also be a sterile injectable solution or suspension in a non-toxic parentally acceptable diluent or solvent, for example as a solution in 1,3-butanediol. Among the acceptable vehicles and solvents that can be employed are water, Ringer's solution and isotonic sodium chloride solution. In addition, sterile, fixed oils are conventionally employed as a solvent or suspending medium. For this purpose, any bland fixed oil can be employed including synthetic mono- or diglycerides. In addition, fatty acids such as oleic acid find use in the preparation of injectables.

[0363] The nucleic acid molecules of the invention can also be administered in the form of suppositories, e.g., for rectal administration of the drug. These compositions can be prepared by mixing the drug with a suitable non-irritating excipient that is solid at ordinary temperatures but liquid at the rectal temperature and will therefore melt in the rectum to release the drug. Such materials include cocoa butter and polyethylene glycols.

[0364] Nucleic acid molecules of the invention can be administered parenterally in a sterile medium. The drug, depending on the vehicle and concentration used, can either be suspended or dissolved in the vehicle. Advantageously, adjuvants such as local anesthetics, preservatives and buffering agents can be dissolved in the vehicle.

[0365] Dosage levels of the order of from about 0.1 mg to about 140 mg per kilogram of body weight per day are useful in the treatment of the above-indicated conditions (about 0.5 mg to about 7 g per subject per day). The amount of active ingredient that can be combined with the carrier materials to produce a single dosage form varies depending upon the host treated and the particular mode of administration. Dosage unit forms generally contain between from about 1 mg to about 500 mg of an active ingredient.

[0366] It is understood that the specific dose level for any particular subject depends upon a variety of factors including the activity of the specific compound employed, the age, body weight, general health, sex, diet, time of administration, route of administration, and rate of excretion, drug combination and the severity of the particular disease undergoing therapy.

[0367] For administration to non-human animals, the composition can also be added to the animal feed or drinking water. It can be convenient to formulate the animal feed and drinking water compositions so that the animal takes in a therapeutically appropriate quantity of the composition along with its diet. It can also be convenient to present the composition as a premix for addition to the feed or drinking water.

[0368] The nucleic acid molecules of the present invention can also be administered to a subject in combination with other therapeutic compounds to increase the overall therapeutic effect. The use of multiple compounds to treat an indication can increase the beneficial effects while reducing the presence of side effects.

[0369] In one embodiment, the invention comprises compositions suitable for administering nucleic acid molecules of the invention to specific cell types. For example, the asialoglycoprotein receptor (ASGPr) (Wu and Wu, 1987, J. Biol. Chem. 262, 4429-4432) is unique to hepatocytes and binds branched galactose-terminal glycoproteins, such as asialoorosomucoid (ASOR). In another example, the folate receptor is overexpressed in many cancer cells. Binding of such glycoproteins, synthetic glycoconjugates, or folates to the receptor takes place with an affinity that strongly depends on the degree of branching of the oligosaccharide chain, for example, triatennary structures are bound with greater affinity than biatenarry or monoatennary chains (Baenziger and Fiete, 1980, Cell, 22, 611-620; Connolly et al., 1982, J. Biol. Chem., 257, 939-945). Lee and Lee, 1987, Glycoconjugate J., 4, 317-328, obtained this high specificity through the use of N-acetyl-D-galactosamine as the carbohydrate moiety, which has higher affinity for the receptor, compared to galactose. This “clustering effect” has also been described for the binding and uptake of mannosyl-terminating glycoproteins or glycoconjugates (Ponpipom et al., 1981, J. Med. Chem., 24, 1388-1395). The use of galactose, galactosamine, or folate based conjugates to transport exogenous compounds across cell membranes can provide a targeted delivery approach to, for example, the treatment of liver disease, cancers of the liver, or other cancers. The use of bioconjugates can also provide a reduction in the required dose of therapeutic compounds required for treatment. Furthermore, therapeutic bioavailability, pharmacodynamics, and pharmacokinetic parameters can be modulated through the use of nucleic acid bioconjugates of the invention. Non-limiting examples of such bioconjugates are described in Vargeese et al., U.S. Ser. No. 10/201,394, filed Aug. 13, 2001; and Matulic-Adamic et al., U.S. Ser. No. 60/362,016, filed Mar. 6, 2002.

[0370] Alternatively, certain siNA molecules of the instant invention can be expressed within cells from eukaryotic promoters (e.g., Izant and Weintraub, 1985, Science, 229, 345; McGarry and Lindquist, 1986, Proc. Natl. Acad. Sci., USA 83, 399; Scanlon et al., 1991, Proc. Natl. Acad. Sci. USA, 88, 10591-5; Kashani-Sabet et al., 1992, Antisense Res. Dev., 2, 3-15; Dropulic et al., 1992, J. Virol., 66, 1432-41; Weerasinghe et al., 1991, J. Virol., 65, 55314; Ojwang et al., 1992, Proc. Natl. Acad. Sci. USA, 89, 10802-6; Chen et al., 1992, Nucleic Acids Res., 20, 4581-9; Sarver et al., 1990 Science, 247, 1222-1225; Thompson et al., 1995, Nucleic Acids Res., 23, 2259; Good et al., 1997, Gene Therapy, 4, 45. Those skilled in the art realize that any nucleic acid can be expressed in eukaryotic cells from the appropriate DNA/RNA vector. The activity of such nucleic acids can be augmented by their release from the primary transcript by a enzymatic nucleic acid (Draper et al., PCT WO 93/23569, and Sullivan et al., PCT WO 94/02595; Ohkawa et al., 1992, Nucleic Acids Symp. Ser., 27, 15-6; Taira et al., 1991, Nucleic Acids Res., 19, 5125-30; Ventura et al., 1993, Nucleic Acids Res., 21, 3249-55; Chowrira et al., 1994, J. Biol. Chem., 269, 25856.

[0371] In another aspect of the invention, RNA molecules of the present invention can be expressed from transcription units (see for example Couture et al., 1996, TIG., 12, 510) inserted into DNA or RNA vectors. The recombinant vectors can be DNA plasmids or viral vectors. siNA expressing viral vectors can be constructed based on, but not limited to, adeno-associated virus, retrovirus, adenovirus, or alphavirus. In another embodiment, pol III based constructs are used to express nucleic acid molecules of the invention (see for example Thompson, U.S. Pats. Nos. 5,902,880 and 6,146,886). The recombinant vectors capable of expressing the siNA molecules can be delivered as described above, and persist in target cells. Alternatively, viral vectors can be used that provide for transient expression of nucleic acid molecules. Such vectors can be repeatedly administered as necessary. Once expressed, the siNA molecule interacts with the target mRNA and generates an RNAi response. Delivery of siNA molecule expressing vectors can be systemic, such as by intravenous or intra-muscular administration, by administration to target cells ex-planted from a subject followed by reintroduction into the subject, or by any other means that would allow for introduction into the desired target cell (for a review see Couture et al., 1996, TIG., 12, 510).

[0372] In one aspect the invention features an expression vector comprising a nucleic acid sequence encoding at least one siNA molecule of the instant invention. The expression vector can encode one or both strands of a siNA duplex, or a single self-complementary strand that self hybridizes into a siNA duplex. The nucleic acid sequences encoding the siNA molecules of the instant invention can be operably linked in a manner that allows expression of the siNA molecule (see for example Paul et al., 2002, Nature Biotechnology, 19, 505; Miyagishi and Taira, 2002, Nature Biotechnology, 19, 497; Lee et al., 2002, Nature Biotechnology, 19, 500; and Novina et al., 2002, Nature Medicine, advance online publication doi:10.1038/nm725).

[0373] In another aspect, the invention features an expression vector comprising: a) a transcription initiation region (e.g., eukaryotic pol I, II or III initiation region); b) a transcription termination region (e.g., eukaryotic pol I, II or III termination region); and c) a nucleic acid sequence encoding at least one of the siNA molecules of the instant invention, wherein said sequence is operably linked to said initiation region and said termination region in a manner that allows expression and/or delivery of the siNA molecule. The vector can optionally include an open reading frame (ORF) for a protein operably linked on the 5′ side or the 3′-side of the sequence encoding the siNA of the invention; and/or an intron (intervening sequences).

[0374] Transcription of the siNA molecule sequences can be driven from a promoter for eukaryotic RNA polymerase I (pol I), RNA polymerase II (pol II), or RNA polymerase III (pol III). Transcripts from pol II or pol III promoters are expressed at high levels in all cells; the levels of a given pol II promoter in a given cell type depends on the nature of the gene regulatory sequences (enhancers, silencers, etc.) present nearby. Prokaryotic RNA polymerase promoters are also used, providing that the prokaryotic RNA polymerase enzyme is expressed in the appropriate cells (Elroy-Stein and Moss, 1990, Proc. Natl. Acad. Sci. USA, 87, 6743-7; Gao and Huang 1993, Nucleic Acids Res., 21, 2867-72; Lieber et al., 1993, Methods Enzymol., 217, 47-66; Zhou et al., 1990, Mol. Cell. Biol., 10, 4529-37). Several investigators have demonstrated that nucleic acid molecules expressed from such promoters can function in mammalian cells (e.g. Kashani-Sabet et al., 1992, Antisense Res. Dev., 2, 3-15; Ojwang et al., 1992, Proc. Natl. Acad. Sci. USA, 89, 10802-6; Chen et al., 1992, Nucleic Acids Res., 20, 4581-9; Yu et al., 1993, Proc. Natl. Acad. Sci. USA, 90, 6340-4; L'Huillier et al., 1992, EMBO J., 11, 4411-8; Lisziewicz et al., 1993, Proc. Natl. Acad. Sci. U S. A, 90, 8000-4; Thompson et al., 1995, Nucleic Acids Res., 23, 2259; Sullenger & Cech, 1993, Science, 262, 1566). More specifically, transcription units such as the ones derived from genes encoding U6 small nuclear (snRNA), transfer RNA (tRNA) and adenovirus VA RNA are useful in generating high concentrations of desired RNA molecules such as siNA in cells (Thompson et al., supra; Couture and Stinchcomb, 1996, supra; Noonberg et al., 1994, Nucleic Acid Res., 22, 2830; Noonberg et al., U.S. Pat. No. 5,624,803; Good et al., 1997, Gene Ther., 4, 45; Beigelman et al., International PCT Publication No. WO 96/18736. The above siNA transcription units can be incorporated into a variety of vectors for introduction into mammalian cells, including but not restricted to, plasmid DNA vectors, viral DNA vectors (such as adenovirus or adeno-associated virus vectors), or viral RNA vectors (such as retroviral or alphavirus vectors) (for a review see Couture and Stinchcomb, 1996, supra).

[0375] In another aspect the invention features an expression vector comprising a nucleic acid sequence encoding at least one of the siNA molecules of the invention in a manner that allows expression of that siNA molecule. The expression vector comprises in one embodiment; a) a transcription initiation region; b) a transcription termination region; and c) a nucleic acid sequence encoding at least one strand of the siNA molecule, wherein the sequence is operably linked to the initiation region and the termination region in a manner that allows expression and/or delivery of the siNA molecule.

[0376] In another embodiment the expression vector comprises: a) a transcription initiation region; b) a transcription termination region; c) an open reading frame; and d) a nucleic acid sequence encoding at least one strand of a siNA molecule, wherein the sequence is operably linked to the 3′-end of the open reading frame and wherein the sequence is operably linked to the initiation region, the open reading frame and the termination region in a manner that allows expression and/or delivery of the siNA molecule. In yet another embodiment, the expression vector comprises: a) a transcription initiation region; b) a transcription termination region; c) an intron; and d) a nucleic acid sequence encoding at least one siNA molecule, wherein the sequence is operably linked to the initiation region, the intron and the termination region in a manner which allows expression and/or delivery of the nucleic acid molecule.

[0377] In another embodiment, the expression vector comprises: a) a transcription initiation region; b) a transcription termination region; c) an intron; d) an open reading frame; and e) a nucleic acid sequence encoding at least one strand of a siNA molecule, wherein the sequence is operably linked to the 3′-end of the open reading frame and wherein the sequence is operably linked to the initiation region, the intron, the open reading frame and the termination region in a manner which allows expression and/or delivery of the siNA molecule.

MAP Kinase Biology and Biochemistry

[0378] The mitogen-activated protein kinases (MAPKs) have been at the forefront of a rapid advance in the understanding of cellular events in growth factor and cytokine receptor signaling. The MAP kinases (also referred to as extracellular signal-regulated protein kinases, or ERKs) are the terminal enzymes in a three-kinase cascade. The reiteration of three-kinase cascades for related but distinct signaling pathways gave rise to the concept of a MAPK pathway as a modular, multifunctional signaling element that acts sequentially within one pathway, where each enzyme phosphorylates and thereby activates the next member in the sequence. A typical MAPK pathway thus consists of three protein kinases: a MAPK kinase kinase (or MEKK) that activates a MAPK kinase (or MEK) which, in turn, activates a MAPK/ERK enzyme. Each of the MAPK/ERK, JNK and p38 cascades consists of a three-enzyme module that includes MEKK, MEK and an ERK or MAPK superfamily member. A variety of extracellular signals triggers initial events upon association with their respective cell surface receptors and this signal is then transmitted to the interior of the cell where it activates the appropriate cascades (see for example FIG. 22).

[0379] The identification of distinct MAPK cascades that are conserved across all eukaryotes indicates that the MAPK module has been adapted for interpretation of a diverse array of extracellular signals. Although mitogen activation of the MAPK subfamily (e.g., ERK1 and ERK2) has dominated efforts to understand MAPK signaling, increasing appreciation of the role of the stress-activated kinases, JNK and p38, illustrates the diverse nature of the MAPK superfamily of enzymes. Although sequence similarities among components of the individual MAPK modules used for activation of ERK1/2, JNKs and p38 are considerable, the fidelity that is maintained in order to translate specific extracellular signals into discrete physiological responses illustrates the selective adaptation of each MAPK pathway. The MAPK superfamily of enzymes is a critical component cellular regulative processes that coordinates incoming signals generated by a variety of extracellular and intracellular mediators. Specific phosphorylation and activation of enzymes in the MAPK pathway transmits the signal down the cascade, resulting in phosphorylation of many proteins with substantial regulatory functions throughout the cell, including other protein kinases, transcription factors, cytoskeletal proteins and other enzymes. The diversity of signals that culminates in MAPK activation indicates that these enzymes are not dedicated to regulation of any single growth factor, hormone or cytokine system. Instead, MAPKs—like cAMP-dependent protein kinase (PKA) and Ca²⁺- and phospholipid-dependent protein kinases (PKC) serve many signaling purposes. Because activation of the MAPK pathways are triggered to varying extents by a large number of receptor systems, temporal and spatial differences are critical to determining ligand- and cell-type-specific functions.

[0380] Following activation of cells with an appropriate extracellular stimuli, the signal is transmitted to the canonical MAPK module comprising three protein kinases. The progression of events for each enzyme cascade is the same, although specific isoforms of each enzyme appear to confer the required specificity within each pathway. The first enzyme in the module is a MEKK enzyme, of which Raf and its isoforms are one example. The MEKK enzymes comprise Ser/Thr protein kinases that activate the MEK enzymes by phosphorylating two serine or threonine residues within a Ser-X-X-X-Ser/Thr motif. Once activated, the MEK enzymes, which are hybrid function Ser/Thr/Tyr protein kinases, phosphorylate the MAPK/ERK enzymes on Thr and Tyr residues within the Thr-X-Tyr (TXY) consensus sequence. A critical and common feature of the MAPK superfamily of enzymes is that they are activated upon dual phosphorylation within a TXY consensus sequence present in the activation loop of the catalytic domain. The central amino acid differs for each MAPK superfamily member, corresponding to Glu for ERK1/2, Gly for p38/HOG and Pro for JNK/SAPK, although MEK specificity is not limited to these particular residues. Phosphorylation at only one of the two positions does not appear to activate the enzyme, although it may prime the kinase domain for receipt of the second phosphorylation event.

[0381] ERK1 and ERK2 were the first members of the MAPK superfamily whose cDNAs were cloned and the signaling cascades that lead to their activation characterized. Potent activation of ERK1 and ERK2 can be initiated through activation of transmembrane receptors with intrinsic protein tyrosine kinase (PTK) activity. Binding of extracellular ligands to their respective cell surface receptors results in receptor autophosphorylation and enhanced PTK activity. The subsequent association of the Src homology 2 (SH2) domains of adaptor proteins such as Grb2 and Shc with the autophosphorylated receptors, or with additional docking proteins, provides the molecular interactions that bring the required signal transduction molecules into close proximity with each other. Receptors without intrinsic PTK activity but which comprise sites for tyrosine phosphorylation can also activate the cascade via association of their phosphotyrosine residues with adaptor molecules. For example, the SH3 domain of Grb2 binds a proline-rich region of the guanine nucleotide-exchange protein SOS which, in turn, increases the association of Ras with GTP. The GTP-bound form of Ras binds to Raf (a MAPK kinase) isoforms, including C-Raf-1, B-Raf and A-Raf. This action targets Raf to the membrane, where its protein kinase activity is increased by phosphorylation. MAPK kinases (MEK1 and MEK2), are phosphorylated and activated by Raf. MEK1 and MEK2 are dual-specificity protein kinases that dually phosphorylate the ERK enzymes (corresponding to Thr¹⁸³ and Tyr¹⁸⁵ of p42ERK2), thereby increasing their enzymatic activity by approximately 1,000-fold over the activity found with the basal or monophosphorylated forms. Phosphorylation of these residues causes closure of the kinase active site and induces conformational changes necessary for high activity.

[0382] MAPK mutants, lacking either a lysine required for catalytic activity or the prerequisite TXY phosphorylation sites, can inhibit signaling by the native enzymes in cells. In the case of ERK1 and ERK2, these mutants have been used with repeated success. For example, mutant ERK2 completely blocks proliferation in response to epidermal growth factor (EGF) and v-Raf, and partially blocks induction by serum or small t antigen. ERK1 antisense mRNA and an ERK1 phosphorylation site mutants interfere with thrombin-induced transcription as well as serum-dependent proliferation. These findings suggest an essential role in proliferation and transformation for the ERK/MAPK pathway.

[0383] The JNK/SAPK and p38/HOG pathways are activated by ultraviolet light, cytokines, osmotic shock, inhibitors of DNA, RNA, and protein synthesis, and to a lesser extent by certain growth factors. This spectrum of regulators suggests that the enzymes are transducers of a variety of cellular stress responses. In contrast to activation of ERK1 and ERK2, upstream signal transduction mechanisms for the JNK and p38 cascades are less well understood. When transfected into mammalian cells, a diverse group of protein kinases including the mixed lineage kinases (MLKs) and relatives of the yeast Ste20p, such as the p21-activated kinases (PAKs) and germinal center kinase (GCK), cause activation of JNK/SAPK. Similarly, GTP-bound forms of the small GTP-binding proteins, Rac and Cdc42, activate the JNK/SAPK pathway and, to a lesser extent, the p38 pathway. Direct activation of both pathways by PAKs also has been demonstrated, suggesting that PAKs can be the relevant effectors for these small G proteins. The PAKs are homologs of the yeast kinases Ste20p and Shk1, enzymes upstream of the MAPK modules in yeast pheromone response pathways. Both yeast and mammalian protein kinases contain a binding site for Rac/Cdc42 and share the property of being activated in vitro through association with these small G proteins when in their GTP-bound states. In yeast, Ste20p is thought to phosphorylate and activate the MEKK isoform Ste11p, suggesting that MEKKs may be PAK targets. This summary of MAP kinase pathways has been adapted from Cobb and Schaefer, 1996, Promega Notes Magazine Number 59, page 37.

[0384] The regulation of c-Jun transcriptional activity by Jun N-terminal kinase (JNK), ERK1, ERK2, and p38 kinases has become a paradigm for the understanding of how mitogen-activated protein (MAP) kinase signaling pathways elicit specific changes in gene transcription through selective phosphorylation of nuclear transcription factors. Selective phosphorylation of c-Jun by JNK is detected by a specific docking motif in c-Jun, the delta region, which enables JNK to physically interact with c-Jun. Analogous MAP kinase docking motifs have subsequently been found in several other transcription factors, indicating that this is a general mechanism for ensuring the specificity of signal transduction. Furthermore, genetic and biochemical studies in mice, flies and cultured cells have provided evidence that signals relayed by JNK through c-Jun regulate a wide range of cellular processes including cell proliferation, tumorigenesis, apoptosis and embryonic development. Despite these advances, in most cases, the genes or programs of gene expression downstream of JNK and c-Jun, which control these processes, have yet to be defined. One important process that is associated with JNK gene expression is the development of insulin resistance in obese subjects.

[0385] Obesity is closely associated with insulin resistance and establishes the leading risk factor for type 2 diabetes mellitus in mammals. The c-Jun amino-terminal kinases (JNKs) can interfere with insulin activity in cultured cells and are activated by inflammatory cytokines and free fatty acids molecules that have been implicated in the development of type 2 diabetes. Hirosumi et al, 2002, Nature, 420, 333-336, demonstrate that JNK activity is abnormally elevated in obesity. Furthermore, Hirosumi et al, supra have shown that an absence of JNK1 results in decreased adiposity with significantly improved insulin sensitivity and enhanced insulin receptor capacity in two different models of mouse obesity. Thus, JNK is a crucial mediator of obesity and insulin resistance and as such, provides a potential target for nucleic acid based therapeutics that modulate JNK gene expression.

[0386] The transcription factor and oncogene, c-JUN, is implicated in several critical cell processes including cell proliferation, cell survival, and oncogenic transformation. Although it is broadly expressed in a wide variety of cell types, it plays an especially important role in hepatocytes. However, the precise role played by c-JUN in hepatocytes seems to depend on the differentiation state of this cell type. Adult differentiated hepatocytes depend on c-JUN for progression through the cell cycle. Deletion of c-JUN reduces the proliferation capacity of hepatocytes following partial hepatectomy. c-JUN is thought to be major component in the development of human hepatocellular carcinoma (HCC). HCC is the the most common form of primary liver cancer. Chronic HCV infection is a major risk factor for HCC.

[0387] The role of c-JUN in liver cancer has recently been investigated (Eferl et al., 2003, Cell, 112, 181). These investigators deleted c-JUN and then induced liver cancer by chemical carcinogenesis. They observed that deletion of c-JUN dramatically interfered with liver tumor formation. Animal survival was markedly worse in c-JUN wildtype animals relative to deletion mutants. In particular, the number of apoptotic cells increased about five fold in tumors in the c-JUN deletion strain relative to the wildtype animals. Importantly, levels of the pro-apoptotic gene products such as p53 and noxa were elevated in the c-JUN deletion strain. c-JUN is likely to antagonize other pro-apoptotic genes such as TNF-a. Thus, by blocking p53 and its large family of dependent genes, c-JUN seems to promote tumor formation. Since a large fraction of chronically infected HCV patients develop hepatocellular carcinoma, c-JUN provides an attractive target for treating HCV infected pateints to prevent or ameliorate hepatocellular carcinoma.

[0388] Based upon the current understanding of MAP kinase pathways, the modulation of MAP kinase pathways is instrumental in the development of new therapeutics in, for example, the fields of proliferative diseases and conditions and/or cancer including breast cancer, cancers of the head and neck including various lymphomas such as mantle cell lymphoma, non-Hodgkins lymphoma, adenoma, squamous cell carcinoma, laryngeal carcinoma, cancers of the retina, cancers of the esophagus, multiple myeloma, ovarian cancer, uterine cancer, melanoma, colorectal cancer, lung cancer, bladder cancer, prostate cancer, glioblastoma, lung cancer (including non-small cell lung carcinoma), pancreatic cancer, cervical cancer, head and neck cancer, skin cancers, nasopharyngeal carcinoma, liposarcoma, epithelial carcinoma, renal cell carcinoma, gallbladder adeno carcinoma, parotid adenocarcinoma, endometrial sarcoma, multidrug resistant cancers; and proliferative diseases and conditions, such as neovascularization associated with tumor angiogenesis, macular degeneration (e.g., wet/dry AMD), corneal neovascularization, diabetic retinopathy, neovascular glaucoma, myopic degeneration and other proliferative diseases and conditions such as restenosis and polycystic kidney disease,; inflammatory diseases and conditions such as inflammation, acute inflammation, chronic inflammation, atherosclerosis, restenosis, asthma, allergic rhinitis, atopic dermatitis, septic shock, rheumatoid arthritis, inflammatory bowl disease, inflammotory pelvic disease, pain, ocular inflammatory disease, celiac disease, Leigh Syndrome, Glycerol Kinase Deficiency, Familial eosinophilia (FE), autosomal recessive spastic ataxia, laryngeal inflammatory disease; Tuberculosis, Chronic cholecystitis, Bronchiectasis, Silicosis and other pneumoconioses; autoimmune diseases and conditions such as multiple sclerosis, diabetes mellitus, lupus, celiac disease, Crohn's disease, ulcerative colitis, Guillain-Barre syndrome, scleroderms, Goodpasture's syndrome, Wegener's granulomatosis, autoimmune epilepsy, Rasmussen's encephalitis, Primary biliary sclerosis, Sclerosing cholangitis, Autoimmune hepatitis Addison's disease, Hashimoto's thyroiditis, fibromyalgia, Menier's syndrome; and transplantation rejection (e.g., prevention of allograft rejection). As such, modulation of a specific MAP kinase pathway using small interfering nucleic acid (siNA) mediated RNAi represents a novel approach to the treatment and study of diseases and conditions related to a specific MAP kinase activity and/or gene expression.

[0389] The use of small interfering nucleic acid molecules targeting MAP kinase, therefore provides a class of novel therapeutic agents that can be used in the treatment, alleviation, or prevention of cancer, inflammatory, autoimmune, neuroligic, ocular, respiratory, allergic, and/or proliferative diseases, conditions, or disorders, alone or in combination with other therapies.

### EXAMPLES

[0390] The following are non-limiting examples showing the selection, isolation, synthesis and activity of nucleic acids of the instant invention.

### Example 1

### Tandem Synthesis of siNA Constructs

[0391] Exemplary siNA molecules of the invention are synthesized in tandem using a cleavable linker, for example, a succinyl-based linker. Tandem synthesis as described herein is followed by a one-step purification process that provides RNAi molecules in high yield. This approach is highly amenable to siNA synthesis in support of high throughput RNAi screening, and can be readily adapted to multi-column or multi-well synthesis platforms.

[0392] After completing a tandem synthesis of a siNA oligo and its complement in which the 5′-terminal dimethoxytrityl (5′-O-DMT) group remains intact (trityl on synthesis), the oligonucleotides are deprotected as described above. Following deprotection, the siNA sequence strands are allowed to spontaneously hybridize. This hybridization yields a duplex in which one strand has retained the 5′-O-DMT group while the complementary strand comprises a terminal 5′-hydroxyl. The newly formed duplex behaves as a single molecule during routine solid-phase extraction purification (Trityl-On purification) even though only one molecule has a dimethoxytrityl group. Because the strands form a stable duplex, this dimethoxytrityl group (or an equivalent group, such as other trityl groups or other hydrophobic moieties) is all that is required to purify the pair of oligos, for example, by using a C18 cartridge.

[0393] Standard phosphoramidite synthesis chemistry is used up to the point of introducing a tandem linker, such as an inverted deoxy abasic succinate or glyceryl succinate linker (see FIG. 1) or an equivalent cleavable linker. A non-limiting example of linker coupling conditions that can be used includes a hindered base such as diisopropylethylamine (DIPA) and/or DMAP in the presence of an activator reagent such as Bromotripyrrolidinophosphoniumhexaflurorophosphate (PyBrOP). After the linker is coupled, standard synthesis chemistry is utilized to complete synthesis of the second sequence leaving the terminal the 5′-O-DMT intact. Following synthesis, the resulting oligonucleotide is deprotected according to the procedures described herein and quenched with a suitable buffer, for example with 50 mM NaOAc or 1.5M NH₄H₂CO₃.

[0394] Purification of the siNA duplex can be readily accomplished using solid phase extraction, for example, using a Waters C18 SepPak 1 g cartridge conditioned with 1 column volume (CV) of acetonitrile, 2 CV H2O, and 2 CV 50 mM NaOAc. The sample is loaded and then washed with 1 CV H2O or 50 mM NaOAc. Failure sequences are eluted with 1 CV 14% ACN (Aqueous with 50 mM NaOAc and 50 mM NaCl). The column is then washed, for example with 1 CV H2O followed by on-column detritylation, for example by passing 1 CV of 1% aqueous trifluoroacetic acid (TFA) over the column, then adding a second CV of 1% aqueous TFA to the column and allowing to stand for approximately 10 minutes. The remaining TFA solution is removed and the column washed with H2O followed by 1 CV 1M NaCl and additional H2O. The siNA duplex product is then eluted, for example, using 1 CV 20% aqueous CAN.

[0395] FIG. 2 provides an example of MALDI-TOF mass spectrometry analysis of a purified siNA construct in which each peak corresponds to the calculated mass of an individual siNA strand of the siNA duplex. The same purified siNA provides three peaks when analyzed by capillary gel electrophoresis (CGE), one peak presumably corresponding to the duplex siNA, and two peaks presumably corresponding to the separate siNA sequence strands. Ion exchange HPLC analysis of the same siNA contract only shows a single peak. Testing of the purified siNA construct using a luciferase reporter assay described below demonstrated the same RNAi activity compared to siNA constructs generated from separately synthesized oligonucleotide sequence strands.

### Example 2

### Identification of Potential siNA Target Sites in any RNA Sequence

[0396] The sequence of an RNA target of interest, such as a viral or human mRNA transcript, is screened for target sites, for example by using a computer folding algorithm. In a non-limiting example, the sequence of a gene or RNA gene transcript derived from a database, such as Genbank, is used to generate siNA targets having complementarity to the target. Such sequences can be obtained from a database, or can be determined experimentally as known in the art. Target sites that are known, for example, those target sites determined to be effective target sites based on studies with other nucleic acid molecules, for example ribozymes or antisense, or those targets known to be associated with a disease or condition such as those sites containing mutations or deletions, can be used to design siNA molecules targeting those sites. Various parameters can be used to determine which sites are the most suitable target sites within the target RNA sequence. These parameters include but are not limited to secondary or tertiary RNA structure, the nucleotide base composition of the target sequence, the degree of homology between various regions of the target sequence, or the relative position of the target sequence within the RNA transcript. Based on these determinations, any number of target sites within the RNA transcript can be chosen to screen siNA molecules for efficacy, for example by using in vitro RNA cleavage assays, cell culture, or animal models. In a non-limiting example, anywhere from 1 to 1000 target sites are chosen within the transcript based on the size of the siNA construct to be used. High throughput screening assays can be developed for screening siNA molecules using methods known in the art, such as with multi-well or multi-plate assays to determine efficient reduction in target gene expression.

### Example 3

### Selection of siNA Molecule Target Sites in a RNA

[0397] The following non-limiting steps can be used to carry out the selection of siNAs targeting a given gene sequence or transcript.

[0398] 1. The target sequence is parsed in silico into a list of all fragments or subsequences of a particular length, for example 23 nucleotide fragments, contained within the target sequence. This step is typically carried out using a custom Perl script, but commercial sequence analysis programs such as Oligo, MacVector, or the GCG Wisconsin Package can be employed as well.

[0399] 2. In some instances the siNAs correspond to more than one target sequence; such would be the case for example in targeting different transcripts of the same gene, targeting different transcripts of more than one gene, or for targeting both the human gene and an animal homolog. In this case, a subsequence list of a particular length is generated for each of the targets, and then the lists are compared to find matching sequences in each list. The subsequences are then ranked according to the number of target sequences that contain the given subsequence; the goal is to find subsequences that are present in most or all of the target sequences. Alternately, the ranking can identify subsequences that are unique to a target sequence, such as a mutant target sequence. Such an approach would enable the use of siNA to target specifically the mutant sequence and not effect the expression of the normal sequence.

[0400] 3. In some instances the siNA subsequences are absent in one or more sequences while present in the desired target sequence; such would be the case if the siNA targets a gene with a paralogous family member that is to remain untargeted. As in case 2 above, a subsequence list of a particular length is generated for each of the targets, and then the lists are compared to find sequences that are present in the target gene but are absent in the untargeted paralog.

[0401] 4. The ranked siNA subsequences can be further analyzed and ranked according to GC content. A preference can be given to sites containing 30-70% GC, with a further preference to sites containing 40-60% GC.

[0402] 5. The ranked siNA subsequences can be further analyzed and ranked according to self-folding and internal hairpins. Weaker internal folds are preferred; strong hairpin structures are to be avoided.

[0403] 6. The ranked siNA subsequences can be further analyzed and ranked according to whether they have runs of GGG or CCC in the sequence. GGG (or even more Gs) in either strand can make oligonucleotide synthesis problematic and can potentially interfere with RNAi activity, so it is avoided whenever better sequences are available. CCC is searched in the target strand because that will place GGG in the antisense strand.

[0404] 7. The ranked siNA subsequences can be further analyzed and ranked according to whether they have the dinucleotide UU (uridine dinucleotide) on the 3′-end of the sequence, and/or AA on the 5′-end of the sequence (to yield 3′ UU on the antisense sequence). These sequences allow one to design siNA molecules with terminal TT thymidine dinucleotides.

[0405] 8. Four or five target sites are chosen from the ranked list of subsequences as described above. For example, in subsequences having 23 nucleotides, the right 21 nucleotides of each chosen 23-mer subsequence are then designed and synthesized for the upper (sense) strand of the siNA duplex, while the reverse complement of the left 21 nucleotides of each chosen 23-mer subsequence are then designed and synthesized for the lower (antisense) strand of the siNA duplex (see Tables II and III). If terminal TT residues are desired for the sequence (as described in paragraph 7), then the two 3′ terminal nucleotides of both the sense and antisense strands are replaced by TT prior to synthesizing the oligos.

[0406] 9. The siNA molecules are screened in an in vitro, cell culture or animal model system to identify the most active siNA molecule or the most preferred target site within the target RNA sequence.

[0407] 10. Other design considerations can be used when selecting target nucleic acid sequences, see, for example, Reynolds et al., 2004, Nature Biotechnology Advanced Online Publication, 1 Feb. 2004, doi:10.1038/nbt936 and Ui-Tei et al., 2004, Nucleic Acids Research, 32, doi:10.1093/nar/gkh247.

[0408] In an alternate approach, a pool of siNA constructs specific to a MAP kinase target sequence is used to screen for target sites in cells expressing MAP kinase (e.g., c-JUN, ERK1, ERK2, JNK1, JNK2, and/or p38) RNA, such as such A549 cells, human kidney fibroblast cells (e.g., 293 cells), HeLa cells, or HepG2 cells. The general strategy used in this approach is shown in FIG. 9. A non-limiting example of such is a pool comprising sequences having any of SEQ ID NOS 1-2356. Cells expressing MAP kinase (e.g., c-JUN, ERK1, ERK2, JNK1, JNK2, and/or p38) are transfected with the pool of siNA constructs and cells that demonstrate a phenotype associated with MAP kinase (e.g., c-JUN, ERK1, ERK2, JNK1, JNK2, and/or p38) inhibition are sorted. The pool of siNA constructs can be expressed from transcription cassettes inserted into appropriate vectors (see for example FIG. 7 and FIG. 8). The siNA from cells demonstrating a positive phenotypic change (e.g., decreased proliferation, decreased MAP kinase (e.g., c-JUN, ERK1, ERK2, JNK1, JNK2, and/or p38) mRNA levels or decreased MAP kinase protein expression), are sequenced to determine the most suitable target site(s) within the target MAP kinase (e.g., c-JUN, ERK1, ERK2, JNK1, JNK2, and/or p38) RNA sequence.

### Example 4

### MAP Kinase Targeted siNA Design

[0409] siNA target sites were chosen by analyzing sequences of the MAP kinase RNA target and optionally prioritizing the target sites on the basis of folding (structure of any given sequence analyzed to determine siNA accessibility to the target), by using a library of siNA molecules as described in Example 3, or alternately by using an in vitro siNA system as described in Example 6 herein. siNA molecules were designed that could bind each target and are optionally individually analyzed by computer folding to assess whether the siNA molecule can interact with the target sequence. Varying the length of the siNA molecules can be chosen to optimize activity. Generally, a sufficient number of complementary nucleotide bases are chosen to bind to, or otherwise interact with, the target RNA, but the degree of complementarity can be modulated to accommodate siNA duplexes or varying length or base composition. By using such methodologies, siNA molecules can be designed to target sites within any known RNA sequence, for example those RNA sequences corresponding to the any gene transcript.

[0410] Chemically modified siNA constructs are designed to provide nuclease stability for systemic administration in vivo and/or improved pharmacokinetic, localization, and delivery properties while preserving the ability to mediate RNAi activity. Chemical modifications as described herein are introduced synthetically using synthetic methods described herein and those generally known in the art. The synthetic siNA constructs are then assayed for nuclease stability in serum and/or cellular/tissue extracts (e.g. liver extracts). The synthetic siNA constructs are also tested in parallel for RNAi activity using an appropriate assay, such as a luciferase reporter assay as described herein or another suitable assay that can quantity RNAi activity. Synthetic siNA constructs that possess both nuclease stability and RNAi activity can be further modified and re-evaluated in stability and activity assays. The chemical modifications of the stabilized active siNA constructs can then be applied to any siNA sequence targeting any chosen RNA and used, for example, in target screening assays to pick lead siNA compounds for therapeutic development (see for example FIG. 11).

### Example 5

### Chemical Synthesis and Purification of siNA

[0411] siNA molecules can be designed to interact with various sites in the RNA message, for example, target sequences within the RNA sequences described herein. The sequence of one strand of the siNA molecule(s) is complementary to the target site sequences described above. The siNA molecules can be chemically synthesized using methods described herein. Inactive siNA molecules that are used as control sequences can be synthesized by scrambling the sequence of the siNA molecules such that it is not complementary to the target sequence. Generally, siNA constructs can by synthesized using solid phase oligonucleotide synthesis methods as described herein (see for example Usman et al., U.S. Pat. Nos. 5,804,683; 5,831,071; 5,998,203; 6,117,657; 6,353,098; 6,362,323; 6,437,117; 6,469,158; Scaringe et al., U.S. Pat. Nos. 6,111,086; 6,008,400; 6,111,086 all incorporated by reference herein in their entirety).

[0412] In a non-limiting example, RNA oligonucleotides are synthesized in a stepwise fashion using the phosphoramidite chemistry as is known in the art. Standard phosphoramidite chemistry involves the use of nucleosides comprising any of 5′-O-dimethoxytrityl, 2′-O-tert-butyldimethylsilyl, 3′-O-2-Cyanoethyl N,N-diisopropylphos-phoroamidite groups, and exocyclic amine protecting groups (e.g. N6-benzoyl adenosine, N4 acetyl cytidine, and N2-isobutyryl guanosine). Alternately, 2′-O-Silyl Ethers can be used in conjunction with acid-labile 2′-O-orthoester protecting groups in the synthesis of RNA as described by Scaringe supra. Differing 2′ chemistries can require different protecting groups, for example 2′-deoxy-2′-amino nucleosides can utilize N-phthaloyl protection as described by Usman et al., U.S. Pat. No. 5,631,360, incorporated by reference herein in its entirety).

[0413] During solid phase synthesis, each nucleotide is added sequentially (3′- to 5′-direction) to the solid support-bound oligonucleotide. The first nucleoside at the 3′-end of the chain is covalently attached to a solid support (e.g., controlled pore glass or polystyrene) using various linkers. The nucleotide precursor, a ribonucleoside phosphoramidite, and activator are combined resulting in the coupling of the second nucleoside phosphoramidite onto the 5′-end of the first nucleoside. The support is then washed and any unreacted 5′-hydroxyl groups are capped with a capping reagent such as acetic anhydride to yield inactive 5′-acetyl moieties. The trivalent phosphorus linkage is then oxidized to a more stable phosphate linkage. At the end of the nucleotide addition cycle, the 5′-O-protecting group is cleaved under suitable conditions (e.g., acidic conditions for trityl-based groups and Fluoride for silyl-based groups). The cycle is repeated for each subsequent nucleotide.

[0414] Modification of synthesis conditions can be used to optimize coupling efficiency, for example by using differing coupling times, differing reagent/phosphoramidite concentrations, differing contact times, differing solid supports and solid support linker chemistries depending on the particular chemical composition of the siNA to be synthesized. Deprotection and purification of the siNA can be performed as is generally described in Usman et al., U.S. Pat. No. 5,831,071, U.S. Pat. No. 6,353,098, U.S. Pat. No. 6,437,117, and Bellon et al., U.S. Pat. No. 6,054,576, U.S. Pat. No. 6,162,909, U.S. Pat. No. 6,303,773, or Scaringe supra, incorporated by reference herein in their entireties. Additionally, deprotection conditions can be modified to provide the best possible yield and purity of siNA constructs. For example, applicant has observed that oligonucleotides comprising 2′-deoxy-2′-fluoro nucleotides can degrade under inappropriate deprotection conditions. Such oligonucleotides are deprotected using aqueous methylamine at about 35° C. for 30 minutes. If the 2′-deoxy-2′-fluoro containing oligonucleotide also comprises ribonucleotides, after deprotection with aqueous methylamine at about 35° C. for 30 minutes, TEA-HF is added and the reaction maintained at about 65° C. for an additional 15 minutes.

### Example 6

### RNAi In Vitro Assay to Assess siNA Activity

[0415] An in vitro assay that recapitulates RNAi in a cell-free system is used to evaluate siNA constructs targeting MAP kinase (e.g., c-JUN, ERK1, ERK2, JNK1, JNK2 and/or p38) RNA targets. The assay comprises the system described by Tuschl et al., 1999, Genes and Development, 13, 3191-3197 and Zamore et al., 2000, Cell, 101, 25-33 adapted for use with MAP kinase target RNA. A Drosophila extract derived from syncytial blastoderm is used to reconstitute RNAi activity in vitro. Target RNA is generated via in vitro transcription from an appropriate MAP kinase expressing plasmid using T7 RNA polymerase or via chemical synthesis as described herein. Sense and antisense siNA strands (for example 20 uM each) are annealed by incubation in buffer (such as 100 mM potassium acetate, 30 mM HEPES-KOH, pH 7.4, 2 mM magnesium acetate) for 1 minute at 90° C. followed by 1 hour at 37° C., then diluted in lysis buffer (for example 100 mM potassium acetate, 30 mM HEPES-KOH at pH 7.4, 2 mM magnesium acetate). Annealing can be monitored by gel electrophoresis on an agarose gel in TBE buffer and stained with ethidium bromide. The Drosophila lysate is prepared using zero to two-hour-old embryos from Oregon R flies collected on yeasted molasses agar that are dechorionated and lysed. The lysate is centrifuged and the supernatant isolated. The assay comprises a reaction mixture containing 50% lysate [vol/vol], RNA (10-50 pM final concentration), and 10% [vol/vol] lysis buffer containing siNA (10 nM final concentration). The reaction mixture also contains 10 mM creatine phosphate, 10 ug/ml creatine phosphokinase, 100 um GTP, 100 uM UTP, 100 uM CTP, 500 uM ATP, 5 mM DTT, 0.1 U/uL RNasin (Promega), and 100 uM of each amino acid. The final concentration of potassium acetate is adjusted to 100 mM. The reactions are pre-assembled on ice and preincubated at 25° C. for 10 minutes before adding RNA, then incubated at 25° C. for an additional 60 minutes. Reactions are quenched with 4 volumes of 1.25×Passive Lysis Buffer (Promega). Target RNA cleavage is assayed by RT-PCR analysis or other methods known in the art and are compared to control reactions in which siNA is omitted from the reaction.

[0416] Alternately, internally-labeled target RNA for the assay is prepared by in vitro transcription in the presence of [alpha-³²p] CTP, passed over a G50 Sephadex column by spin chromatography and used as target RNA without further purification. Optionally, target RNA is 5′-³²P-end labeled using T4 polynucleotide kinase enzyme. Assays are performed as described above and target RNA and the specific RNA cleavage products generated by RNAi are visualized on an autoradiograph of a gel. The percentage of cleavage is determined by PHOSPHOR IMAGER® (autoradiography) quantitation of bands representing intact control RNA or RNA from control reactions without siNA and the cleavage products generated by the assay.

[0417] In one embodiment, this assay is used to determine target sites in the MAP kinase RNA target for siNA mediated RNAi cleavage, wherein a plurality of siNA constructs are screened for RNAi mediated cleavage of the MAP kinase RNA target, for example, by analyzing the assay reaction by electrophoresis of labeled target RNA, or by northern blotting, as well as by other methodology well known in the art.

### Example 7

### Nucleic Acid Inhibition of MAP Kinase Target RNA

[0418] siNA molecules targeted to the human MAP kinase (e.g., c-JUN, ERK1, ERK2, JNK1, JNK2, and/or p38) RNA are designed and synthesized as described above. These nucleic acid molecules can be tested for cleavage activity in vivo, for example, using the following procedure. The target sequences and the nucleotide location within the MAP kinase (e.g., c-JUN, ERK1, ERK2, JNK1, JNK2, and/or p38) RNA are given in Tables II and III.

[0419] Two formats are used to test the efficacy of siNAs targeting MAP kinase (e.g., c-JUN, ERK1, ERK2, JNK1, JNK2, and/or p38). First, the reagents are tested in cell culture using, for example, cultured human kidney fibroblast cells (e.g., A549, 293, HeLa, or HepG2 cells) to determine the extent of RNA and protein inhibition. siNA reagents (e.g.; see Tables II and III) are selected against the MAP kinase (e.g., c-JUN, ERK1, ERK2, JNK1, JNK2, and/or p38) target as described herein. RNA inhibition is measured after delivery of these reagents by a suitable transfection agent to, for example, A549, 293, HeLa, or HepG2 cells. Relative amounts of target RNA are measured versus actin using real-time PCR monitoring of amplification (eg., ABI 7700 TAQMAN®). A comparison is made to a mixture of oligonucleotide sequences made to unrelated targets or to a randomized siNA control with the same overall length and chemistry, but randomly substituted at each position. Primary and secondary lead reagents are chosen for the target and optimization performed. After an optimal transfection agent concentration is chosen, a RNA time-course of inhibition is performed with the lead siNA molecule. In addition, a cell-plating format can be used to determine RNA inhibition.

Delivery of siNA to Cells

[0420] Cells such as A549, 293, HeLa, or HepG2 cells are seeded, for example, at 1×10⁵ cells per well of a six-well dish in EGM-2 (BioWhittaker) the day before transfection. siNA (final concentration, for example 20 nM) and cationic lipid (e.g., final concentration 2 μg/ml) are complexed in EGM basal media (Bio Whittaker) at 37° C. for 30 minutes in polystyrene tubes. Following vortexing, the complexed siNA is added to each well and incubated for the times indicated. For initial optimization experiments, cells are seeded, for example, at 1×10³ in 96 well plates and siNA complex added as described. Efficiency of delivery of siNA to cells is determined using a fluorescent siNA complexed with lipid. Cells in 6-well dishes are incubated with siNA for 24 hours, rinsed with PBS and fixed in 2% paraformaldehyde for 15 minutes at room temperature. Uptake of siNA is visualized using a fluorescent microscope.

TAQMAN® (Real-Time PCR Monitoring of Amplification) and Lightcycler Quantification of mRNA

[0421] Total RNA is prepared from cells following siNA delivery, for example, using Qiagen RNA purification kits for 6-well or Rneasy extraction kits for 96-well assays. For TAQMAN® analysis (real-time PCR monitoring of amplification), dual-labeled probes are synthesized with the reporter dye, FAM or JOE, covalently linked at the 5′-end and the quencher dye TAMRA conjugated to the 3′-end. One-step RT-PCR amplifications are performed on, for example, an ABI PRISM 7700 Sequence Detector using 50 μl reactions consisting of 10 μl total RNA, 100 nM forward primer, 900 nM reverse primer, 100 nM probe, 1×TaqMan PCR reaction buffer (PE-Applied Biosystems), 5.5 mM MgCl₂, 300 μM each dATP, dCTP, dGTP, and dTTP, 10 U RNase Inhibitor (Promega), 1.25 U AMPLITAQ GOLD® (DNA polymerase) (PE-Applied Biosystems) and 10 U M-MLV Reverse Transcriptase (Promega). The thermal cycling conditions can consist of 30 minutes at 48° C., 10 minutes at 95° C., followed by 40 cycles of 15 seconds at 95° C. and 1 minute at 60° C. Quantitation of mRNA levels is determined relative to standards generated from serially diluted total cellular RNA (300, 100, 33, 11 ng/r×n) and normalizing to β-actin or GAPDH mRNA in parallel TAQMAN® reactions (real-time PCR monitoring of amplification). For each gene of interest an upper and lower primer and a fluorescently labeled probe are designed. Real time incorporation of SYBR Green I dye into a specific PCR product can be measured in glass capillary tubes using a lightcyler. A standard curve is generated for each primer pair using control cRNA. Values are represented as relative expression to GAPDH in each sample.

Western Blotting

[0422] Nuclear extracts can be prepared using a standard micro preparation technique (see for example Andrews and Faller, 1991, Nucleic Acids Research, 19, 2499). Protein extracts from supernatants are prepared, for example using TCA precipitation. An equal volume of 20% TCA is added to the cell supernatant, incubated on ice for 1 hour and pelleted by centrifugation for 5 minutes. Pellets are washed in acetone, dried and resuspended in water. Cellular protein extracts are run on a 10% Bis-Tris NuPage (nuclear extracts) or 4-12% Tris-Glycine (supernatant extracts) polyacrylamide gel and transferred onto nitro-cellulose membranes. Non-specific binding can be blocked by incubation, for example, with 5% non-fat milk for 1 hour followed by primary antibody for 16 hour at 4° C. Following washes, the secondary antibody is applied, for example (1:10,000 dilution) for 1 hour at room temperature and the signal detected with SuperSignal reagent (Pierce).

### Example 8

### Animal Models Useful to Evaluate the Down-Regulation of MAP Kinase Gene Expression

[0423] Evaluating the efficacy of anti-MAP kinase agents in animal models is an important prerequisite to human clinical trials. Various animal models of cancer, inflammatory, autoimmune, neuroligic, ocular, respiratory, allergic, and/or proliferative diseases, conditions, or disorders as are known in the art can be adapted for use for pre-clinical evaluation of the efficacy of nucleic acid compositions of the invetention in modulating MAP kinase gene expression toward therapeutic use.

Cell Culture

[0424] There are numerous cell culture systems that can be used to analyze reduction of MAP kinase levels either directly or indirectly by measuring downstream effects. For example, cultured human kidney fibroblast cells (e.g., 293 cells), HeLa, or HepG2 cells can be used in cell culture experiments to assess the efficacy of nucleic acid molecules of the invention. As such, cells treated with nucleic acid molecules of the invention (e.g., siNA) targeting MAP kinase RNA would be expected to have decreased MAP kinase expression capacity compared to matched control nucleic acid molecules having a scrambled or inactive sequence. In a non-limiting example, 293, HeLa, or HepG2 cells are cultured and MAP kinase expression is quantified, for example by time-resolved immuno fluorometric assay. MAP kinase messenger-RNA expression is quantitated with RT-PCR in cultured cells. Untreated cells are compared to cells treated with siNA molecules transfected with a suitable reagent, for example a cationic lipid such as lipofectamine, and MAP kinase protein and RNA levels are quantitated. Dose response assays are then performed to establish dose dependent inhibition of MAP kinase expression. In another non-limiting example, cell culture experiments are carried out as described by Aguirre et al., 2000, J. Biol. Chem., 275, 9047-9054.

[0425] In several cell culture systems, cationic lipids have been shown to enhance the bioavailability of oligonucleotides to cells in culture (Bennet, et al., 1992, Mol. Pharmacology, 41, 1023-1033). In one embodiment, siNA molecules of the invention are complexed with cationic lipids for cell culture experiments. siNA and cationic lipid mixtures are prepared in serum-free DMEM immediately prior to addition to the cells. DMEM plus additives are warmed to room temperature (about 20-25° C.) and cationic lipid is added to the final desired concentration and the solution is vortexed briefly. siNA molecules are added to the final desired concentration and the solution is again vortexed briefly and incubated for 10 minutes at room temperature. In dose response experiments, the RNA/lipid complex is serially diluted into DMEM following the 10 minute incubation.

Animal Models

[0426] Evaluating the efficacy of anti-MAP kinase agents in animal models is an important prerequisite to human clinical trials. Obesity and type 2 diabetes are the most prevalent and serious metabolic diseases in that they affect more than 50% of adults in the USA. These conditions are associated with a chronic inflammatory response characterized by abnormal inflammatory cytokine production, increased acute-phase reactants and other stress-induced molecules. Many of these alterations seem to be initiated and to reside within adipose tissue. Elevated production of tumour necrosis factor (TNF)-alpha by adipose tissue decreases sensitivity to insulin and has been detected in several experimental obesity models and obese humans. Free fatty acids (FFAs) are also implicated in the etiology of obesity-induced insulin resistance and diabetes. Because both TNF-alpha and FFAs are potent MAP kinase activators, Hirosumi et al., 2002, Nature, 420, 333-336 determined whether obesity is associated with alterations in stress-activated and inflammatory responses through this pathway and whether MAP kinases are causally linked to aberrant metabolic control in this state. In this study, Hirosumi et al., describe dietary and genetic (ob/ob) mouse models of obesity useful in evaluating MAP kinase gene expression. Such transgenic mice are useful as models for obesity and insulin resistance and can be used to identify nucleic acid molecules of the invention that modulate MAP kinase gene (e.g., ERK1, ERK2, JNK1, JNK2, and/or p38) expression and gene function toward therapeutic use in treating obesity and insulin resistance (e.g. type I and II diabetes).

[0427] The role of c-JUN in liver cancer has recently been investigated (Eferl et al., 2003, Cell, 112, 181). These investigators deleted c-JUN and then induced liver cancer by chemical carcinogenesis. They observed that deletion of c-JUN dramatically interfered with liver tumor formation. Animal survival was markedly worse in c-JUN wildtype animals relative to deletion mutants. In particular, the number of apoptotic cells increased about five fold in tumors in the c-JUN deletion strain relative to the wildtype animals. Importantly, levels of the pro-apoptotic gene products such as p53 and noxa were elevated in the c-JUN deletion strain. c-JUN is likely to antagonize other pro-apoptotic genes such as TNF-a. Thus, by blocking p53 and its large family of dependent genes, c-JUN seems to promote tumor formation. Since a large fraction of chronically infected HCV patients develop hepatocellular carcinoma, c-JUN provides an attractive target for treating HCV infected pateints to prevent or ameliorate hepatocellular carcinoma. The animal model described by Eferl et al., supra, can be used to evaluate siNA molecules of the invention for efficacy in inhibiting c-JUN expression in liver toward therapeutic use in preventing and/or treating hepatocellular carcinoma in human subjects.

[0428] Because mitogen activated protein kinases (MAP kinases) are constituents of numerous signal transduction pathways, and are activated by protein kinase cascades, intense efforts are under way to develop and evaluate compounds that target components of MAPK pathways. Several of these inhibitors are effective in animal models of disease and have advanced to clinical trials for the treatment of inflammatory diseases, metabolic diseases, autoimmune diseases and cancer. The clinical utility of specifically targeting MAP kinase genes (e.g., c-JUN, ERK1, ERK2, JNK1, JNK2, and/or p38) can be studied in animal models and clinical studies of inflammatory diseases, metabolic diseases, autoimmune diseases and cancer (see for example English et al., 2002, Trends in Pharmacological Sciences, 23, 40-45).

### Example 9

### RNAi Mediated Inhibition of p38 (MAPK14) Expression

[0429] siNA constructs (Table III) are tested for efficacy in reducing p38 RNA expression in, for example, A549 cells. Cells are plated approximately 24 hours before transfection in 96-well plates at 5,000-7,500 cells/well, 100 μl/well, such that at the time of transfection cells are 70-90% confluent. For transfection, annealed siNAs are mixed with the transfection reagent (Lipofectamine 2000, Invitrogen) in a volume of 501 μl/well and incubated for 20 minutes at room temperature. The siNA transfection mixtures are added to cells to give a final siNA concentration of 25 nM in a volume of 150 μl. Each siNA transfection mixture is added to 3 wells for triplicate siNA treatments. Cells are incubated at 37° for 24 hours in the continued presence of the siNA transfection mixture. At 24 hours, RNA is prepared from each well of treated cells. The supernatants with the transfection mixtures are first removed and discarded, then the cells are lysed and RNA prepared from each well. Target gene expression following treatment is evaluated by RT-PCR for the target gene and for a control gene (36B4, an RNA polymerase subunit) for normalization. The triplicate data is averaged and the standard deviations determined for each treatment. Normalized data are graphed and the percent reduction of target mRNA by active siNAs in comparison to their respective inverted control siNAs is determined.

[0430] In a non-limiting example, chemically modified siNA constructs (Table III) were tested for efficacy as described above in reducing p38 RNA expression in A549 cells. Active siNAs were evaluated compared to untreated cells, matched chemistry irrelevant controls (IC1, IC2), and a transfection control. Results are summarized in FIG. 23. FIG. 23 shows results for chemically modified siNA constructs targeting various sites in p38 mRNA. As shown in FIG. 23, the active siNA constructs provide significant inhibition of p38 gene expression in cell culture experiments as determined by levels of p38 mRNA when compared to appropriate controls.

### Example 10

### RNAi Mediated Inhibition of JNK1 Expression

[0431] siNA constructs (Table III) are tested for efficacy in reducing JNK1 RNA expression in, for example, A549 cells. Cells are plated approximately 24 hours before transfection in 96-well plates at 5,000-7,500 cells/well, 100 μl/well, such that at the time of transfection cells are 70-90% confluent. For transfection, annealed siNAs are mixed with the transfection reagent (Lipofectamine 2000, Invitrogen) in a volume of 50 μl/well and incubated for 20 minutes at room temperature. The siNA transfection mixtures are added to cells to give a final siNA concentration of 25 nM in a volume of 150 μl. Each siNA transfection mixture is added to 3 wells for triplicate siNA treatments. Cells are incubated at 37° for 24 hours in the continued presence of the siNA transfection mixture. At 24 hours, RNA is prepared from each well of treated cells. The supernatants with the transfection mixtures are first removed and discarded, then the cells are lysed and RNA prepared from each well. Target gene expression following treatment is evaluated by RT-PCR for the target gene and for a control gene (36B4, an RNA polymerase subunit) for normalization. The triplicate data is averaged and the standard deviations determined for each treatment. Normalized data are graphed and the percent reduction of target mRNA by active siNAs in comparison to their respective inverted control siNAs is determined.

[0432] In a non-limiting example, chemically modified siNA constructs (Table III) were tested for efficacy as described above in reducing JNK1 RNA expression in A549 cells. Active siNAs were evaluated compared to untreated cells, matched chemistry irrelevant controls (IC1, IC2), and a transfection control. Results are summarized in FIG. 24. FIG. 24 shows results for chemically modified siNA constructs targeting various sites in JNK1 mRNA. As shown in FIG. 24, the active siNA constructs provide significant inhibition of JNK1 gene expression in cell culture experiments as determined by levels of JNK1 mRNA when compared to appropriate controls.

### Example 11

### RNAi Mediated Inhibition of c-JUN Expression

[0433] siNA constructs (Table III) are tested for efficacy in reducing c-JUN RNA expression in, for example, HEPA1C1C7 cells. Cells are plated approximately 24 hours before transfection in 96-well plates at 5,000-7,500 cells/well, 100 μl/well, such that at the time of transfection cells are 70-90% confluent. For transfection, annealed siNAs are mixed with the transfection reagent (Lipofectamine 2000, Invitrogen) in a volume of 50 μl/well and incubated for 20 minutes at room temperature. The siNA transfection mixtures are added to cells to give a final siNA concentration of 25 nM in a volume of 150 μl. Each siNA transfection mixture is added to 3 wells for triplicate siNA treatments. Cells are incubated at 37° for 24 hours in the continued presence of the siNA transfection mixture. At 24 hours, RNA is prepared from each well of treated cells. The supernatants with the transfection mixtures are first removed and discarded, then the cells are lysed and RNA prepared from each well. Target gene expression following treatment is evaluated by RT-PCR for the target gene and for a control gene (36B4, an RNA polymerase subunit) for normalization. The triplicate data is averaged and the standard deviations determined for each treatment. Normalized data are graphed and the percent reduction of target mRNA by active siNAs in comparison to their respective inverted control siNAs is determined.

[0434] In a non-limiting example, chemically modified siNA constructs (32090/32110; 32330/32332; 32092/32112; 32331/32333; 31824/31832; 32021/32023) (see Table III) were tested for efficacy as described above in reducing c-JUN RNA expression in HEPA1C1C7 cells. Active siNAs were evaluated compared to untreated cells, matched chemistry irrelevant controls (32334/32336; 32335/32337; 31840/31848; 32037/32039) and a transfection control (lipid alone). Results are summarized in FIG. 25. FIG. 25 shows results for chemically modified siNA constructs targeting various sites in c-JUN mRNA. As shown in FIG. 25, the active siNA constructs provide significant inhibition of c-JUN gene expression in cell culture experiments as determined by levels of c-JUN mRNA when compared to appropriate controls.

### Example 12

### RNAi Mediated Inhibition of ERK1 (MAPK 3) Expression

[0435] siNA constructs (Table III) are tested for efficacy in reducing ERK1 RNA expression in, for example, A549 cells. Cells are plated approximately 24 hours before transfection in 96-well plates at 5,000-7,500 cells/well, 100 μl/well, such that at the time of transfection cells are 70-90% confluent. For transfection, annealed siNAs are mixed with the transfection reagent (Lipofectamine 2000, Invitrogen) in a volume of 50 μl/well and incubated for 20 minutes at room temperature. The siNA transfection mixtures are added to cells to give a final siNA concentration of 25 nM in a volume of 150 μl. Each siNA transfection mixture is added to 3 wells for triplicate siNA treatments. Cells are incubated at 37° for 24 hours in the continued presence of the siNA transfection mixture. At 24 hours, RNA is prepared from each well of treated cells. The supernatants with the transfection mixtures are first removed and discarded, then the cells are lysed and RNA prepared from each well. Target gene expression following treatment is evaluated by RT-PCR for the target gene and for a control gene (36B4, an RNA polymerase subunit) for normalization. The triplicate data is averaged and the standard deviations determined for each treatment. Normalized data are graphed and the percent reduction of target mRNA by active siNAs in comparison to their respective inverted control siNAs is determined.

[0436] In a non-limiting example, chemically modified siNA constructs (Table III) were tested for efficacy as described above in reducing ERK1 RNA expression in A549 cells. Active siNAs were evaluated compared to untreated cells, matched chemistry irrelevant controls (IC1, IC2), and a transfection control. Results are summarized in FIG. 26. FIG. 26 shows results for chemically modified siNA constructs targeting various sites in ERK1 mRNA. As shown in FIG. 26, the active siNA constructs provide significant inhibition of ERK1 gene expression in cell culture experiments as determined by levels of ERK1 mRNA when compared to appropriate controls.

### Example 13

### Indications

[0437] The present body of knowledge in MAP kinase research indicates the need for methods and compounds that can regulate MAP kinase gene (e.g., c-JUN, ERK1, ERK2, JNK1, JNK2, and/or p38) product expression for research, diagnostic, and therapeutic use. As described herein, the nucleic acid molecules of the present invention can be used to treat proliferative diseases and conditions and/or cancer including breast cancer, cancers of the head and neck including various lymphomas such as mantle cell lymphoma, non-Hodgkins lymphoma, adenoma, squamous cell carcinoma, laryngeal carcinoma, cancers of the retina, cancers of the esophagus, multiple myeloma, ovarian cancer, uterine cancer, melanoma, colorectal cancer, lung cancer, bladder cancer, prostate cancer, glioblastoma, lung cancer (including non-small cell lung carcinoma), pancreatic cancer, cervical cancer, head and neck cancer, skin cancers, nasopharyngeal carcinoma, liposarcoma, epithelial carcinoma, renal cell carcinoma, gallbladder adeno carcinoma, parotid adenocarcinoma, endometrial sarcoma, multidrug resistant cancers; and proliferative diseases and conditions, such as neovascularization associated with tumor angiogenesis, macular degeneration (e.g., wet/dry AMD), corneal neovascularization, diabetic retinopathy, neovascular glaucoma, myopic degeneration and other proliferative diseases and conditions such as restenosis and polycystic kidney disease,; inflammatory diseases and conditions such as inflammation, acute inflammation, chronic inflammation, atherosclerosis, restenosis, asthma, allergic rhinitis, atopic dermatitis, septic shock, rheumatoid arthritis, inflammatory bowl disease, inflammotory pelvic disease, pain, ocular inflammatory disease, celiac disease, deep dermal burn, Leigh Syndrome, Glycerol Kinase Deficiency, Familial eosinophilia (FE), autosomal recessive spastic ataxia, laryngeal inflammatory disease; Tuberculosis, Chronic cholecystitis, Bronchiectasis, Silicosis and other pneumoconioses; autoimmune diseases and conditions such as multiple sclerosis, diabetes mellitus, lupus, celiac disease, Crohn's disease, ulcerative colitis, Guillain-Barre syndrome, scleroderms, Goodpasture's syndrome, Wegener's granulomatosis, autoimmune epilepsy, Rasmussen's encephalitis, Primary biliary sclerosis, Sclerosing cholangitis, Autoimmune hepatitis Addison's disease, Hashimoto's thyroiditis, fibromyalgia, Menier's syndrome; and transplantation rejection (e.g., prevention of allograft rejection) and any other any other disease that responds to modulation of MAP kinase expression.

[0438] The use of radiation treatments and chemotherapeutics such as Gemcytabine and cyclophosphamide are also non-limiting examples of chemotherapeutic agents that can also be combined with or used in conjunction with the nucleic acid molecules (e.g. siNA molecules) of the instant invention for oncology therapeutic applications. Those skilled in the art will recognize that other anti-cancer compounds and therapies can be similarly be readily combined with the nucleic acid molecules of the instant invention (e.g. siNA molecules) and are hence within the scope of the instant invention. Such compounds and therapies are well known in the art (see for example Cancer: Principles and Practice of Oncology, Volumes 1 and 2, eds Devita, V. T., Hellman, S., and Rosenberg, S. A., J. B. Lippincott Company, Philadelphia, USA; incorporated herein by reference) and include, without limitations, folates, antifolates, pyrimidine analogs, fluoropyrimidines, purine analogs, adenosine analogs, topoisomerase I inhibitors, anthrapyrazoles, retinoids, antibiotics, anthacyclins, platinum analogs, alkylating agents, nitrosoureas, plant derived compounds such as vinca alkaloids, epipodophyllotoxins, tyrosine kinase inhibitors, taxols, radiation therapy, surgery, nutritional supplements, gene therapy, radiotherapy, for example 3D-CRT, immunotoxin therapy, for example ricin, and monoclonal antibodies. Specific examples of chemotherapeutic compounds that can be combined with or used in conjunction with the nucleic acid molecules of the invention include, but are not limited to, Paclitaxel; Docetaxel; Methotrexate; Doxorubin; Edatrexate; Vinorelbine; Tamoxifen; Leucovorin; 5-fluoro uridine (5-FU); lonotecan; Cisplatin; Carboplatin; Amsacrine; Cytarabine; Bleomycin; Mitomycin C; Dactinomycin; Mithramycin; Hexamethylmelamine; Dacarbazine; L-asperginase; Nitrogen mustard; Melphalan, Chlorambucil; Busulfan; Ifosfamide; 4-hydroperoxycyclophosphamide, Thiotepa; Irinotecan (CAMPTOSAR®, CPT-11, Camptothecin-11, Campto) Tamoxifen, Herceptin; IMC C225; ABX-EGF: and combinations thereof are non-limiting examples of compounds and/or methods that can be combined with or used in conjunction with the nucleic acid molecules (e.g. siNA) of the instant invention. Troglitazone, insulin, and PTP-1B modulators are non-limiting examples of pharmaceutical agents that can be combined with or used in conjunction with the nucleic acid molecules (e.g. siNA molecules) of the instant invention for treating obesity and diabetes. In addition, treatment of HCV infected subjects with siNA molecules of the invention targeting c-JUN or other MAP kinases involved in the maintenace or development of hepatocellular carcinoma can be combined with anti-viral compounds, such as siNA molecules targeting HCV RNA or other antiviral compounds known in the art (e.g., interferons, nucleoside analogs etc.). Those skilled in the art will recognize that other drug compounds and therapies can be similarly be readily combined with the nucleic acid molecules of the instant invention (e.g., siNA molecules) are hence within the scope of the instant invention.

### Example 14

### Diagnostic Uses

[0439] The siNA molecules of the invention can be used in a variety of diagnostic applications, such as in the identification of molecular targets (e.g., RNA) in a variety of applications, for example, in clinical, industrial, environmental, agricultural and/or research settings. Such diagnostic use of siNA molecules involves utilizing reconstituted RNAi systems, for example, using cellular lysates or partially purified cellular lysates. siNA molecules of this invention can be used as diagnostic tools to examine genetic drift and mutations within diseased cells or to detect the presence of endogenous or exogenous, for example viral, RNA in a cell. The close relationship between siNA activity and the structure of the target RNA allows the detection of mutations in any region of the molecule, which alters the base-pairing and three-dimensional structure of the target RNA. By using multiple siNA molecules described in this invention, one can map nucleotide changes, which are important to RNA structure and function in vitro, as well as in cells and tissues. Cleavage of target RNAs with siNA molecules can be used to inhibit gene expression and define the role of specified gene products in the progression of disease or infection. In this manner, other genetic targets can be defined as important mediators of the disease. These experiments will lead to better treatment of the disease progression by affording the possibility of combination therapies (e.g., multiple siNA molecules targeted to different genes, siNA molecules coupled with known small molecule inhibitors, or intermittent treatment with combinations siNA molecules and/or other chemical or biological molecules). Other in vitro uses of siNA molecules of this invention are well known in the art, and include detection of the presence of mRNAs associated with a disease, infection, or related condition. Such RNA is detected by determining the presence of a cleavage product after treatment with a siNA using standard methodologies, for example, fluorescence resonance emission transfer (FRET).

[0440] In a specific example, siNA molecules that cleave only wild-type or mutant forms of the target RNA are used for the assay. The first siNA molecules (i.e., those that cleave only wild-type forms of target RNA) are used to identify wild-type RNA present in the sample and the second siNA molecules (i.e., those that cleave only mutant forms of target RNA) are used to identify mutant RNA in the sample. As reaction controls, synthetic substrates of both wild-type and mutant RNA are cleaved by both siNA molecules to demonstrate the relative siNA efficiencies in the reactions and the absence of cleavage of the “non-targeted” RNA species. The cleavage products from the synthetic substrates also serve to generate size markers for the analysis of wild-type and mutant RNAs in the sample population. Thus, each analysis requires two siNA molecules, two substrates and one unknown sample, which is combined into six reactions. The presence of cleavage products is determined using an RNase protection assay so that full-length and cleavage fragments of each RNA can be analyzed in one lane of a polyacrylamide gel. It is not absolutely required to quantify the results to gain insight into the expression of mutant RNAs and putative risk of the desired phenotypic changes in target cells. The expression of mRNA whose protein product is implicated in the development of the phenotype (i.e., disease related or infection related) is adequate to establish risk. If probes of comparable specific activity are used for both transcripts, then a qualitative comparison of RNA levels is adequate and decreases the cost of the initial diagnosis. Higher mutant form to wild-type ratios are correlated with higher risk whether RNA levels are compared qualitatively or quantitatively.

[0441] All patents and publications mentioned in the specification are indicative of the levels of skill of those skilled in the art to which the invention pertains. All references cited in this disclosure are incorporated by reference to the same extent as if each reference had been incorporated by reference in its entirety individually.

[0442] One skilled in the art would readily appreciate that the present invention is well adapted to carry out the objects and obtain the ends and advantages mentioned, as well as those inherent therein. The methods and compositions described herein as presently representative of preferred embodiments are exemplary and are not intended as limitations on the scope of the invention. Changes therein and other uses will occur to those skilled in the art, which are encompassed within the spirit of the invention, are defined by the scope of the claims.

[0443] It will be readily apparent to one skilled in the art that varying substitutions and modifications can be made to the invention disclosed herein without departing from the scope and spirit of the invention. Thus, such additional embodiments are within the scope of the present invention and the following claims. The present invention teaches one skilled in the art to test various combinations and/or substitutions of chemical modifications described herein toward generating nucleic acid constructs with improved activity for mediating RNAi activity. Such improved activity can comprise improved stability, improved bioavailability, and/or improved activation of cellular responses mediating RNAi. Therefore, the specific embodiments described herein are not limiting and one skilled in the art can readily appreciate that specific combinations of the modifications described herein can be tested without undue experimentation toward identifying siNA molecules with improved RNAi activity.

[0444] The invention illustratively described herein suitably can be practiced in the absence of any element or elements, limitation or limitations that are not specifically disclosed herein. Thus, for example, in each instance herein any of the terms “comprising”, “consisting essentially of”, and “consisting of” may be replaced with either of the other two terms. The terms and expressions which have been employed are used as terms of description and not of limitation, and there is no intention that in the use of such terms and expressions of excluding any equivalents of the features shown and described or portions thereof, but it is recognized that various modifications are possible within the scope of the invention claimed. Thus, it should be understood that although the present invention has been specifically disclosed by preferred embodiments, optional features, modification and variation of the concepts herein disclosed may be resorted to by those skilled in the art, and that such modifications and variations are considered to be within the scope of this invention as defined by the description and the appended claims.

[0445] In addition, where features or aspects of the invention are described in terms of Markush groups or other grouping of alternatives, those skilled in the art will recognize that the invention is also thereby described in terms of any individual member or subgroup of members of the Markush group or other group.

TABLE I
MAP kinase Accession Numbers

| | |
|---|---|
| NM_002745 | Homo sapiens mitogen-activated protein kinase 1 (MAPK1), transcript variant 1, mRNA. |
| NM_138957 | Homo sapiens mitogen-activated protein kinase 1 (MAPK1), transcript variant 2, mRNA. |
| X60188 | Human ERK1 mRNA for protein serine/threonine kinase (MAPK3). |
| XM_055766 | Homo sapiens mitogen-activated protein kinase 3 (MAPK3), mRNA |
| NM_002747 | Homo sapiens mitogen-activated protein kinase 4 (MAPK4), mRNA |
| XM_165662 | Homo sapiens Mitogen-activated protein kinase 4 (Extracellular signal-regulated kinase 4) (ERK-4) (MAP kinase |
| | isoform p63) (p63-MAPK) (LOC220131), mRNA |
| NM_002748 | Homo sapiens mitogen-activated protein kinase 6 (MAPK6), mRNA. |
| XM_166057 | Homo sapiens Mitogen-activated protein kinase 6 (Extracellular signal-regulated kinase 3) (ERK-3) (MAP kinase |
| | isoform p97) (p97-MAPK) (LOC220839), mRNA |
| XM_035575 | Homo sapiens mitogen-activated protein kinase 6 (MAPK6), mRNA |
| NM_139033 | Homo sapiens mitogen-activated protein kinase 7 (MAPK7), transcript variant 1, mRNA |
| NM_139032 | Homo sapiens mitogen-activated protein kinase 7 (MAPK7), transcript variant 2, mRNA |
| NM_002749 | Homo sapiens mitogen-activated protein kinase 7 (MAPK7), transcript variant 3, mRNA |
| NM_139034 | Homo sapiens mitogen-activated protein kinase 7 (MAPK7), transcript variant 4, mRNA |
| NM_139049 | Homo sapiens mitogen-activated protein kinase 8 (MAPK8), transcript variant 1, mRNA. |
| NM_002750 | Homo sapiens mitogen-activated protein kinase 8 (MAPK8), transcript variant 2, mRNA. |
| NM_139046 | Homo sapiens mitogen-activated protein kinase 8 (MAPK8), transcript variant 3, mRNA. |
| NM_139047 | Homo sapiens mitogen-activated protein kinase 8 (MAPK8), transcript variant 4, mRNA. |
| NM_002752 | Homo sapiens mitogen-activated protein kinase 9 (MAPK9), transcript variant 1, mRNA. |
| NM_139068 | Homo sapiens mitogen-activated protein kinase 9 (MAPK9), transcript variant 2, mRNA. |
| NM_139069 | Homo sapiens mitogen-activated protein kinase 9 (MAPK9), transcript variant 3, mRNA. |
| NM_139070 | Homo sapiens mitogen-activated protein kinase 9 (MAPK9), transcript variant 4, mRNA. |
| NM_002753 | Homo sapiens mitogen-activated protein kinase 10 (MAPK10), transcript variant 1, mRNA |
| NM_138982 | Homo sapiens mitogen-activated protein kinase 10 (MAPK10), transcript variant 2, mRNA |
| NM_138980 | Homo sapiens mitogen-activated protein kinase 10 (MAPK10), transcript variant 3, mRNA |
| NM_138981 | Homo sapiens mitogen-activated protein kinase 10 (MAPK10), transcript variant 4, mRNA |
| NM_002751 | Homo sapiens mitogen-activated protein kinase 11 (MAPK11), transcript variant 1, mRNA. |
| NM_138993 | Homo sapiens mitogen-activated protein kinase 11 (MAPK11), transcript variant 2, mRNA. |
| NM_002969 | Homo sapiens mitogen-activated protein kinase 12 (MAPK12), mRNA. |
| NM_002754 | Homo sapiens mitogen-activated protein kinase 13 (MAPK13), mRNA. |
| NM_001315 | Homo sapiens mitogen-activated protein kinase 14 (MAPK14), transcript variant 1, mRNA. |
| NM_139012 | Homo sapiens mitogen-activated protein kinase 14 (MAPK14), transcript variant 2, mRNA. |
| NM_139013 | Homo sapiens mitogen-activated protein kinase 14 (MAPK14), transcript variant 3, mRNA. |
| NM_139014 | Homo sapiens mitogen-activated protein kinase 14 (MAPK14), transcript variant 4, mRNA. |
| NM_002755 | Homo sapiens mitogen-activated protein kinase kinase 1 (MAP2K1), mRNA |
| NM_030662 | Homo sapiens mitogen-activated protein kinase kinase 2 (MAP2K2), mRNA |
| NM_002756 | Homo sapiens mitogen-activated protein kinase kinase 3 (MAP2K3), transcript variant A, mRNA |
| NM_145109 | Homo sapiens mitogen-activated protein kinase kinase 3 (MAP2K3), transcript variant B, mRNA |
| NM_145110 | Homo sapiens mitogen-activated protein kinase kinase 3 (MAP2K3), transcript variant C, mRNA |
| XM_008654 | Homo sapiens mitogen-activated protein kinase kinase 4 (MAP2K4), mRNA |
| NM_003010 | Homo sapiens mitogen-activated protein kinase kinase 4 (MAP2K4), mRNA |
| NM_145160 | Homo sapiens mitogen-activated protein kinase kinase 5 (MAP2K5), transcript variant A, mRNA |
| NM_002757 | Homo sapiens mitogen-activated protein kinase kinase 5 (MAP2K5), transcript variant B, mRNA |
| NM_145161 | Homo sapiens mitogen-activated protein kinase kinase 5 (MAP2K5), transcript variant C, mRNA |
| NM_145162 | Homo sapiens mitogen-activated protein kinase kinase 5 (MAP2K5), transcript variant D, mRNA |
| XM_113313 | Homo sapiens mitogen-activated protein kinase kinase 6 (MAP2K6), mRNA |
| NM_002758 | Homo sapiens mitogen-activated protein kinase kinase 6 (MAP2K6), transcript variant 1, mRNA |
| NM_031988 | Homo sapiens mitogen-activated protein kinase kinase 6 (MAP2K6), transcript variant 2, mRNA |
| NM_005043 | Homo sapiens mitogen-activated protein kinase kinase 7 (MAP2K7), transcript variant A, mRNA |
| NM_145185 | Homo sapiens mitogen-activated protein kinase kinase 7 (MAP2K7), transcript variant B, mRNA |
| NM_145329 | Homo sapiens mitogen-activated protein kinase kinase 7 (MAP2K7), transcript variant C, mRNA |
| AF042838 | Homo sapiens mitogen-activated protein kinase kinase kinase 1 (MAP3K1), mRNA |
| NM_006609 | Homo sapiens mitogen-activated protein kinase kinase kinase 2 (MAP3K2), mRNA |
| NM_002401 | Homo sapiens mitogen-activated protein kinase kinase kinase 3 (MAP3K3), mRNA |
| NM_005922 | Homo sapiens mitogen-activated protein kinase kinase kinase 4 (MAP3K4), transcript variant 1, mRNA |
| NM_006724 | Homo sapiens mitogen-activated protein kinase kinase kinase 4 (MAP3K4), transcript variant 2, mRNA |
| NM_005923 | Homo sapiens mitogen-activated protein kinase kinase kinase 5 (MAP3K5), mRNA |
| NM_004672 | Homo sapiens mitogen-activated protein kinase kinase kinase 6 (MAP3K6), mRNA |
| NM_003188 | Homo sapiens mitogen-activated protein kinase kinase kinase 7 (MAP3K7), mRNA |
| NM_005204 | Homo sapiens mitogen-activated protein kinase kinase kinase 8 (MAP3K8), mRNA |
| AF251442 | Homo sapiens mitogen-activated protein kinase kinase kinase 9 (MAP3K9), mRNA |
| NM_002446 | Homo sapiens mitogen-activated protein kinase kinase kinase 10 (MAP3K10), mRNA |
| NM_002419 | Homo sapiens mitogen-activated protein kinase kinase kinase 11 (MAP3K11), mRNA |
| NM_006301 | Homo sapiens mitogen-activated protein kinase kinase kinase 12 (MAP3K12), mRNA |
| NM_004721 | Homo sapiens mitogen-activated protein kinase kinase kinase 13 (MAP3K13), mRNA |
| NM_003954 | Homo sapiens mitogen-activated protein kinase kinase kinase 14 (MAP3K14), mRNA |
| NM_007181 | Homo sapiens mitogen-activated protein kinase kinase kinase kinase 1 (MAP4K1), mRNA |
| NM_004579 | Homo sapiens mitogen-activated protein kinase kinase kinase kinase 2 (MAP4K2), mRNA |
| NM_003618 | Homo sapiens mitogen-activated protein kinase kinase kinase kinase 3 (MAP4K3), mRNA |
| NM_004834 | Homo sapiens mitogen-activated protein kinase kinase kinase kinase 4 (MAP4K4), mRNA |
| NM_006575 | Homo sapiens mitogen-activated protein kinase kinase kinase kinase 5 (MAP4K5), mRNA |
| NM_003668 | Homo sapiens mitogen-activated protein kinase-activated protein kinase 5 (MAPKAPK5), transcript variant 1, mRNA |
| NM_139078 | Homo sapiens mitogen-activated protein kinase-activated protein kinase 5 (MAPKAPK5), transcript variant 2, mRNA |
| NM_004635 | Homo sapiens mitogen-activated protein kinase-activated protein kinase 3 (MAPKAPK3), mRNA |
| NM_004759 | Homo sapiens mitogen-activated protein kinase-activated protein kinase 2 (MAPKAPK2), transcript variant 1, mRNA |
| NM_032960 | Homo sapiens mitogen-activated protein kinase-activated protein kinase 2 (MAPKAPK2), transcript variant 2, mRNA |
| NM_005373 | Homo sapiens myeloproliferative leukemia virus oncogene (MPL), mRNA |
| NM_016848 | Homo sapiens neuronal Shc (SHC3), mRNA |
| NM_002649 | Homo sapiens phosphoinositide-3-kinase, catalytic, gamma polypeptide (PIK3CG), mRNA |
| NM_021003 | Homo sapiens protein phosphatase 1A (formerly 2C), magnesium-dependent, alpha isoform (PPM1A), mRNA |
| NM_003942 | Homo sapiens ribosomal protein S6 kinase, 90 kD, polypeptide 4 (RPS6KA4), mRNA |
| NM_004755 | Homo sapiens ribosomal protein S6 kinase, 90 kD, polypeptide 5 (RPS6KA5), mRNA |
| NM_002228 | Homo sapiens v-jun sarcoma virus 17 oncogene homolog (avian) (JUN), mRNA |

[0446] TABLE II

MAP kinase siNA and Target Sequences

| | | | | | | | | |
|---|---|---|---|---|---|---|---|---|
| | | Seq | | | Seq | | | Seq |
| Pos | Target Sequence | ID | UPos | Upper seq | ID | LPos | Lower seq | ID |

MAPK1 NM_002745.2

| | | | | | | | | |
|---|---|---|---|---|---|---|---|---|
| 3 | CCCUCCCUCCGCCCGCCCG | 1 | 3 | CCCUCCCUCCGCCCGCCCG | 1 | 21 | CGGGCGGGCGGAGGGAGGG | 164 |
| 21 | GCCGGCCCGCCCGUCAGUC | 2 | 21 | GCCGGCCCGCCCGUCAGUC | 2 | 39 | GACUGACGGGCGGGCCGGC | 165 |
| 39 | CUGGCAGGCAGGCAGGCAA | 3 | 39 | CUGGCAGGCAGGCAGGCAA | 3 | 57 | UUGCCUGCCUGCCUGCCAG | 166 |
| 57 | AUCGGUCCGAGUGGCUGUC | 4 | 57 | AUCGGUCCGAGUGGCUGUC | 4 | 75 | GACAGCCACUCGGACCGAU | 167 |
| 75 | CGGCUCUUCAGCUCUCCCG | 5 | 75 | CGGCUCUUCAGCUCUCCCG | 5 | 93 | CGGGAGAGCUGAAGAGCCG | 168 |
| 93 | GCUCGGCGUCUUCCUUCCU | 6 | 93 | GCUCGGCGUCUUCCUUCCU | 6 | 111 | AGGAAGGAAGACGCCGAGC | 169 |
| 111 | UCCUCCCGGUCAGCGUCGG | 7 | 111 | UCCUCCCGGUCAGCGUCGG | 7 | 129 | CCGACGCUGACCGGGAGGA | 170 |
| 129 | GCGGCUGCACCGGCGGCGG | 8 | 129 | GCGGCUGCACCGGCGGCGG | 8 | 147 | CCGCCGCCGGUGCAGCCGC | 171 |
| 147 | GCGCAGUCCCUGCGGGAGG | 9 | 147 | GCGCAGUCCCUGCGGGAGG | 9 | 165 | CCUCCCGCAGGGACUGCGC | 172 |
| 165 | GGGCGACAAGAGCUGAGCG | 10 | 165 | GGGCGACAAGAGCUGAGCG | 10 | 183 | CGCUCAGCUCUUGUCGCCC | 173 |
| 183 | GGCGGCCGCCGAGCGUCGA | 11 | 183 | GGCGGCCGCCGAGCGUCGA | 11 | 201 | UCGACGCUCGGCGGCCGCC | 174 |
| 201 | AGCUCAGCGCGGCGGAGGC | 12 | 201 | AGCUCAGCGCGGCGGAGGC | 12 | 219 | GCCUCCGCCGCGCUGAGCU | 175 |
| 219 | CGGCGGCGGCCCGGCAGCC | 13 | 219 | CGGCGGCGGCCCGGCAGCC | 13 | 237 | GGCUGCCGGGCCGCCGCCG | 176 |
| 237 | CAACAUGGCGGCGGCGGCG | 14 | 237 | CAACAUGGCGGCGGCGGCG | 14 | 255 | CGCCGCCGCCGCCAUGUUG | 177 |
| 255 | GGCGGCGGGCGCGGGCCCG | 15 | 255 | GGCGGCGGGCGCGGGCCCG | 15 | 273 | CGGGCCCGCGCCCGCCGCC | 178 |
| 273 | GGAGAUGGUCCGCGGGCAG | 16 | 273 | GGAGAUGGUCCGCGGGCAG | 16 | 291 | CUGCCCGCGGACCAUCUCC | 179 |
| 291 | GGUGUUCGACGUGGGGCCG | 17 | 291 | GGUGUUCGACGUGGGGCCG | 17 | 309 | CGGCCCCACGUCGAACACC | 180 |
| 309 | GCGCUACACCAACCUCUCG | 18 | 309 | GCGCUACACCAACCUCUCG | 18 | 327 | CGAGAGGUUGGUGUAGCGC | 181 |
| 327 | GUACAUCGGCGAGGGCGCC | 19 | 327 | GUACAUCGGCGAGGGCGCC | 19 | 345 | GGCGCCCUCGCCGAUGUAC | 182 |
| 345 | CUACGGCAUGGUGUGCUCU | 20 | 345 | CUACGGCAUGGUGUGCUCU | 20 | 363 | AGAGCACACCAUGCCGUAG | 183 |
| 363 | UGCUUAUGAUAAUGUCAAC | 21 | 363 | UGCUUAUGAUAAUGUCAAC | 21 | 381 | GUUGACAUUAUCAUAAGCA | 184 |
| 381 | CAAAGUUCGAGUAGCUAUC | 22 | 381 | CAAAGUUCGAGUAGCUAUC | 22 | 399 | GAUAGCUACUCGAACUUUG | 185 |
| 399 | CAAGAAAAUCAGCCCCUUU | 23 | 399 | CAAGAAAAUCAGCCCCUUU | 23 | 417 | AAAGGGGCUGAUUUUCUUG | 186 |
| 417 | UGAGCACCAGACCUACUGC | 24 | 417 | UGAGCACCAGACCUACUGC | 24 | 435 | GCAGUAGGUCUGGUGCUCA | 187 |
| 435 | CCAGAGAACCCUGAGGGAG | 25 | 435 | CCAGAGAACCCUGAGGGAG | 25 | 453 | CUCCCUCAGGGUUCUCUGG | 188 |
| 453 | GAUAAAAAUCUUACUGCGC | 26 | 453 | GAUAAAAAUCUUACUGCGC | 26 | 471 | GCGCAGUAAGAUUUUUAUC | 189 |
| 471 | CUUCAGACAUGAGAACAUC | 27 | 471 | CUUCAGACAUGAGAACAUC | 27 | 489 | GAUGUUCUCAUGUCUGAAG | 190 |
| 489 | CAUUGGAAUCAAUGACAUU | 28 | 489 | CAUUGGAAUCAAUGACAUU | 28 | 507 | AAUGUCAUUGAUUCCAAUG | 191 |
| 507 | UAUUCGAGCACCAACCAUC | 29 | 507 | UAUUCGAGCACCAACCAUC | 29 | 525 | GAUGGUUGGUGCUCGAAUA | 192 |
| 525 | CGAGCAAAUGAAAGAUGUA | 30 | 525 | CGAGCAAAUGAAAGAUGUA | 30 | 543 | UACAUCUUUCAUUUGCUCG | 193 |
| 543 | AUAUAUAGUACAGGACCUC | 31 | 543 | AUAUAUAGUACAGGACCUC | 31 | 561 | GAGGUCCUGUACUAUAUAU | 194 |
| 561 | CAUGGAAACAGAUCUUUAC | 32 | 561 | CAUGGAAACAGAUCUUUAC | 32 | 579 | GUAAAGAUCUGUUUCCAUG | 195 |
| 579 | CAAGCUCUUGAAGACACAA | 33 | 579 | CAAGCUCUUGAAGACACAA | 33 | 597 | UUGUGUCUUCAAGAGCUUG | 196 |
| 597 | ACACCUCAGCAAUGACCAU | 34 | 597 | ACACCUCAGCAAUGACCAU | 34 | 615 | AUGGUCAUUGCUGAGGUGU | 197 |
| 615 | UAUCUGCUAUUUUCUCUAC | 35 | 615 | UAUCUGCUAUUUUCUCUAC | 35 | 633 | GUAGAGAAAAUAGCAGAUA | 198 |
| 633 | CCAGAUCCUCAGAGGGUUA | 36 | 633 | CCAGAUCCUCAGAGGGUUA | 36 | 651 | UAACCCUCUGAGGAUCUGG | 199 |
| 651 | AAAAUAUAUCCAUUCAGCU | 37 | 651 | AAAAUAUAUCCAUUCAGCU | 37 | 669 | AGCUGAAUGGAUAUAUUUU | 200 |
| 669 | UAACGUUCUGCACCGUGAC | 38 | 669 | UAACGUUCUGCACCGUGAC | 38 | 687 | GUCACGGUGCAGAACGUUA | 201 |
| 687 | CCUCAAGCCUUCCAACCUG | 39 | 687 | CCUCAAGCCUUCCAACCUG | 39 | 705 | CAGGUUGGAAGGCUUGAGG | 202 |
| 705 | GCUGCUCAACACCACCUGU | 40 | 705 | GCUGCUCAACACCACCUGU | 40 | 723 | ACAGGUGGUGUUGAGCAGC | 203 |
| 723 | UGAUCUCAAGAUCUGUGAC | 41 | 723 | UGAUCUCAAGAUCUGUGAC | 41 | 741 | GUCACAGAUCUUGAGAUCA | 204 |
| 741 | CUUUGGCCUGGCCCGUGUU | 42 | 741 | CUUUGGCCUGGCCCGUGUU | 42 | 759 | AACACGGGCCAGGCCAAAG | 205 |
| 759 | UGCAGAUCCAGACCAUGAU | 43 | 759 | UGCAGAUCCAGACCAUGAU | 43 | 777 | AUCAUGGUCUGGAUCUGCA | 206 |
| 777 | UCACACAGGGUUCCUGACA | 44 | 777 | UCACACAGGGUUCCUGACA | 44 | 795 | UGUCAGGAACCCUGUGUGA | 207 |
| 795 | AGAAUAUGUGGCCACACGU | 45 | 795 | AGAAUAUGUGGCCACACGU | 45 | 813 | ACGUGUGGCCACAUAUUCU | 208 |
| 813 | UUGGUACAGGGCUCCAGAA | 46 | 813 | UUGGUACAGGGCUCCAGAA | 46 | 831 | UUCUGGAGCCCUGUACCAA | 209 |
| 831 | AAUUAUGUUGAAUUCCAAG | 47 | 831 | AAUUAUGUUGAAUUCCAAG | 47 | 849 | CUUGGAAUUCAACAUAAUU | 210 |
| 849 | GGGCUACACCAAGUCCAUU | 48 | 849 | GGGCUACACCAAGUCCAUU | 48 | 867 | AAUGGACUUGGUGUAGCCC | 211 |
| 867 | UGAUAUUUGGUCUGUAGGC | 49 | 867 | UGAUAUUUGGUCUGUAGGC | 49 | 885 | GCCUACAGACCAAAUAUCA | 212 |
| 885 | CUGCAUUCUGGCAGAAAUG | 50 | 885 | CUGCAUUCUGGCAGAAAUG | 50 | 903 | CAUUUCUGCCAGAAUGCAG | 213 |
| 903 | GCUUUCUAACAGGCCCAUC | 51 | 903 | GCUUUCUAACAGGCCCAUC | 51 | 921 | GAUGGGCCUGUUAGAAAGC | 214 |
| 921 | CUUUCCAGGGAAGCAUUAU | 52 | 921 | CUUUCCAGGGAAGCAUUAU | 52 | 939 | AUAAUGCUUCCCUGGAAAG | 215 |
| 939 | UCUUGACCAGCUGAAACAC | 53 | 939 | UCUUGACCAGCUGAAACAC | 53 | 957 | GUGUUUCAGCUGGUCAAGA | 216 |
| 957 | CAUUUUGGGUAUUCUUGGA | 54 | 957 | CAUUUUGGGUAUUCUUGGA | 54 | 975 | UCCAAGAAUACCCAAAAUG | 217 |
| 975 | AUCCCCAUCACAAGAAGAC | 55 | 975 | AUCCCCAUCACAAGAAGAC | 55 | 993 | GUCUUCUUGUGAUGGGGAU | 218 |
| 993 | CCUGAAUUGUAUAAUAAAU | 56 | 993 | CCUGAAUUGUAUAAUAAAU | 56 | 1011 | AUUUAUUAUACAAUUCAGG | 219 |
| 1011 | UUUAAAAGCUAGGAACUAU | 57 | 1011 | UUUAAAAGCUAGGAACUAU | 57 | 1029 | AUAGUUCCUAGCUUUUAAA | 220 |
| 1029 | UUUGCUUUCUCUUCCACAC | 58 | 1029 | UUUGCUUUCUCUUCCACAC | 58 | 1047 | GUGUGGAAGAGAAAGCAAA | 221 |
| 1047 | CAAAAAUAAGGUGCCAUGG | 59 | 1047 | CAAAAAUAAGGUGCCAUGG | 59 | 1065 | CCAUGGCACCUUAUUUUUG | 222 |
| 1065 | GAACAGGCUGUUCCCAAAU | 60 | 1065 | GAACAGGCUGUUCCCAAAU | 60 | 1083 | AUUUGGGAACAGCCUGUUC | 223 |
| 1083 | UGCUGACUCCAAAGCUCUG | 61 | 1083 | UGCUGACUCCAAAGCUCUG | 61 | 1101 | CAGAGCUUUGGAGUCAGCA | 224 |
| 1101 | GGACUUAUUGGACAAAAUG | 62 | 1101 | GGACUUAUUGGACAAAAUG | 62 | 1119 | CAUUUUGUCCAAUAAGUCC | 225 |
| 1119 | GUUGACAUUCAACCCACAC | 63 | 1119 | GUUGACAUUCAACCCACAC | 63 | 1137 | GUGUGGGUUGAAUGUCAAC | 226 |
| 1137 | CAAGAGGAUUGAAGUAGAA | 64 | 1137 | CAAGAGGAUUGAAGUAGAA | 64 | 1155 | UUCUACUUCAAUCCUCUUG | 227 |
| 1155 | ACAGGCUCUGGCCCACCCA | 65 | 1155 | ACAGGCUCUGGCCCACCCA | 65 | 1173 | UGGGUGGGCCAGAGCCUGU | 228 |
| 1173 | AUAUCUGGAGCAGUAUUAC | 66 | 1173 | AUAUCUGGAGCAGUAUUAC | 66 | 1191 | GUAAUACUGCUCCAGAUAU | 229 |
| 1191 | CGACCCGAGUGACGAGCCC | 67 | 1191 | CGACCCGAGUGACGAGCCC | 67 | 1209 | GGGCUCGUCACUCGGGUCG | 230 |
| 1209 | CAUCGCCGAAGCACCAUUC | 68 | 1209 | CAUCGCCGAAGCACCAUUC | 68 | 1227 | GAAUGGUGCUUCGGCGAUG | 231 |
| 1227 | CAAGUUCGACAUGGAAUUG | 69 | 1227 | CAAGUUCGACAUGGAAUUG | 69 | 1245 | CAAUUCCAUGUCGAACUUG | 232 |
| 1245 | GGAUGACUUGCCUAAGGAA | 70 | 1245 | GGAUGACUUGCCUAAGGAA | 70 | 1263 | UUCCUUAGGCAAGUCAUCC | 233 |
| 1263 | AAAGCUCAAAGAACUAAUU | 71 | 1263 | AAAGCUCAAAGAACUAAUU | 71 | 1281 | AAUUAGUUCUUUGAGCUUU | 234 |
| 1281 | UUUUGAAGAGACUGCUAGA | 72 | 1281 | UUUUGAAGAGACUGCUAGA | 72 | 1299 | UCUAGCAGUCUCUUCAAAA | 235 |
| 1299 | AUUCCAGCCAGGAUACAGA | 73 | 1299 | AUUCCAGCCAGGAUACAGA | 73 | 1317 | UCUGUAUCCUGGCUGGAAU | 236 |
| 1317 | AUCUUAAAUUUGUCAGGAC | 74 | 1317 | AUCUUAAAUUUGUCAGGAC | 74 | 1335 | GUCCUGACAAAUUUAAGAU | 237 |
| 1335 | CAAGGGCUCAGAGGACUGG | 75 | 1335 | CAAGGGCUCAGAGGACUGG | 75 | 1353 | CCAGUCCUCUGAGCCCUUG | 238 |
| 1353 | GACGUGCUCAGACAUCGGU | 76 | 1353 | GACGUGCUCAGACAUCGGU | 76 | 1371 | ACCGAUGUCUGAGCACGUC | 239 |
| 1371 | UGUUCUUCUUCCCAGUUCU | 77 | 1371 | UGUUCUUCUUCCCAGUUCU | 77 | 1389 | AGAACUGGGAAGAAGAACA | 240 |
| 1389 | UUGACCCCUGGUCCUGUCU | 78 | 1389 | UUGACCCCUGGUCCUGUCU | 78 | 1407 | AGACAGGACCAGGGGUCAA | 241 |
| 1407 | UCCAGCCCGUCUUGGCUUA | 79 | 1407 | UCCAGCCCGUCUUGGCUUA | 79 | 1425 | UAAGCCAAGACGGGCUGGA | 242 |
| 1425 | AUCCACUUUGACUCCUUUG | 80 | 1425 | AUCCACUUUGACUCCUUUG | 80 | 1443 | CAAAGGAGUCAAAGUGGAU | 243 |
| 1443 | GAGCCGUUUGGAGGGGCGG | 81 | 1443 | GAGCCGUUUGGAGGGGCGG | 81 | 1461 | CCGCCCCUCCAAACGGCUC | 244 |
| 1461 | GUUUCUGGUAGUUGUGGCU | 82 | 1461 | GUUUCUGGUAGUUGUGGCU | 82 | 1479 | AGCCACAACUACCAGAAAC | 245 |
| 1479 | UUUUAUGCUUUCAAAGAAU | 83 | 1479 | UUUUAUGCUUUCAAAGAAU | 83 | 1497 | AUUCUUUGAAAGCAUAAAA | 246 |
| 1497 | UUUCUUCAGUCCAGAGAAU | 84 | 1497 | UUUCUUCAGUCCAGAGAAU | 84 | 1515 | AUUCUCUGGACUGAAGAAA | 247 |
| 1515 | UUCCUCCUGGCAGCCCUGU | 85 | 1515 | UUCCUCCUGGCAGCCCUGU | 85 | 1533 | ACAGGGCUGCCAGGAGGAA | 248 |
| 1533 | UGUGUGUCACCCAUUGGUG | 86 | 1533 | UGUGUGUCACCCAUUGGUG | 86 | 1551 | CACCAAUGGGUGACACACA | 249 |
| 1551 | GACCUGCGGCAGUAUGUAC | 87 | 1551 | GACCUGCGGCAGUAUGUAC | 87 | 1569 | GUACAUACUGCCGCAGGUC | 250 |
| 1569 | CUUCAGUGCACCUUACUGC | 88 | 1569 | CUUCAGUGCACCUUACUGC | 88 | 1587 | GCAGUAAGGUGCACUGAAG | 251 |
| 1587 | CUUACUGUUGCUUUAGUCA | 89 | 1587 | CUUACUGUUGCUUUAGUCA | 89 | 1605 | UGACUAAAGCAACAGUAAG | 252 |
| 1605 | ACUAAUUGCUUUCUGGUUU | 90 | 1605 | ACUAAUUGCUUUCUGGUUU | 90 | 1623 | AAACCAGAAAGCAAUUAGU | 253 |
| 1623 | UGAAAGAUGCAGUGGUUCC | 91 | 1623 | UGAAAGAUGCAGUGGUUCC | 91 | 1641 | GGAACCACUGCAUCUUUCA | 254 |
| 1641 | CUCCCUCUCCUGAAUCCUU | 92 | 1641 | CUCCCUCUCCUGAAUCCUU | 92 | 1659 | AAGGAUUCAGGAGAGGGAG | 255 |
| 1659 | UUUCUACAUGAUGCCCUGC | 93 | 1659 | UUUCUACAUGAUGCCCUGC | 93 | 1677 | GCAGGGCAUCAUGUAGAAA | 256 |
| 1677 | CUGACCAUGCAGCCGCACC | 94 | 1677 | CUGACCAUGCAGCCGCACC | 94 | 1695 | GGUGCGGCUGCAUGGUCAG | 257 |
| 1695 | CAGAGAGAGAUUCUUCCCC | 95 | 1695 | CAGAGAGAGAUUCUUCCCC | 95 | 1713 | GGGGAAGAAUCUCUCUCUG | 258 |
| 1713 | CAAUUGGCUCUAGUCACUG | 96 | 1713 | CAAUUGGCUCUAGUCACUG | 96 | 1731 | CAGUGACUAGAGCCAAUUG | 259 |
| 1731 | GGCAUCUCACUUUAUGAUA | 97 | 1731 | GGCAUCUCACUUUAUGAUA | 97 | 1749 | UAUCAUAAAGUGAGAUGCC | 260 |
| 1749 | AGGGAAGGCUACUACCUAG | 98 | 1749 | AGGGAAGGCUACUACCUAG | 98 | 1767 | CUAGGUAGUAGCCUUCCCU | 261 |
| 1767 | GGGCACUUUAAGUCAGUGA | 99 | 1767 | GGGCACUUUAAGUCAGUGA | 99 | 1785 | UCACUGACUUAAAGUGCCC | 262 |
| 1785 | ACAGCCCCUUAUUUGCACU | 100 | 1785 | ACAGCCCCUUAUUUGCACU | 100 | 1803 | AGUGCAAAUAAGGGGCUGU | 263 |
| 1803 | UUCACCUUUUGACCAUAAC | 101 | 1803 | UUCACCUUUUGACCAUAAC | 101 | 1821 | GUUAUGGUCAAAAGGUGAA | 264 |
| 1821 | CUGUUUCCCCAGAGCAGGA | 102 | 1821 | CUGUUUCCCCAGAGCAGGA | 102 | 1839 | UCCUGCUCUGGGGAAACAG | 265 |
| 1839 | AGCUUGUGGAAAUACCUUG | 103 | 1839 | AGCUUGUGGAAAUACCUUG | 103 | 1857 | CAAGGUAUUUCCACAAGCU | 266 |
| 1857 | GGCUGAUGUUGCAGCCUGC | 104 | 1857 | GGCUGAUGUUGCAGCCUGC | 104 | 1875 | GCAGGCUGCAACAUCAGCC | 267 |
| 1875 | CAGCAAGUGCUUCCGUCUC | 105 | 1875 | CAGCAAGUGCUUCCGUCUC | 105 | 1893 | GAGACGGAAGCACUUGCUG | 268 |
| 1893 | CCGGAAUCCUUGGGGAGCA | 106 | 1893 | CCGGAAUCCUUGGGGAGCA | 106 | 1911 | UGCUCCCCAAGGAUUCCGG | 269 |
| 1911 | ACUUGUCCACGUCUUUUCU | 107 | 1911 | ACUUGUCCACGUCUUUUCU | 107 | 1929 | AGAAAAGACGUGGACAAGU | 270 |
| 1929 | UCAUAUCAUGGUAGUCACU | 108 | 1929 | UCAUAUCAUGGUAGUCACU | 108 | 1947 | AGUGACUACCAUGAUAUGA | 271 |
| 1947 | UAACAUAUAUAAGGUAUGU | 109 | 1947 | UAACAUAUAUAAGGUAUGU | 109 | 1965 | ACAUACCUUAUAUAUGUUA | 272 |
| 1965 | UGCUAUUGGCCCAGCUUUU | 110 | 1965 | UGCUAUUGGCCCAGCUUUU | 110 | 1983 | AAAAGCUGGGCCAAUAGCA | 273 |
| 1983 | UAGAAAAUGCAGUCAUUUU | 111 | 1983 | UAGAAAAUGCAGUCAUUUU | 111 | 2001 | AAAAUGACUGCAUUUUCUA | 274 |
| 2001 | UUCUAAAUAAAAAGGAAGU | 112 | 2001 | UUCUAAAUAAAAAGGAAGU | 112 | 2019 | ACUUCCUUUUUAUUUAGAA | 275 |
| 2019 | UACUGCACCCAGCAGUGUC | 113 | 2019 | UACUGCACCCAGCAGUGUC | 113 | 2037 | GACACUGCUGGGUGCAGUA | 276 |
| 2037 | CACUCUGUAGUUACUGUGG | 114 | 2037 | CACUCUGUAGUUACUGUGG | 114 | 2055 | CCACAGUAACUACAGAGUG | 277 |
| 2055 | GUCACUUGUACCAUAUAGA | 115 | 2055 | GUCACUUGUACCAUAUAGA | 115 | 2073 | UCUAUAUGGUACAAGUGAC | 278 |
| 2073 | AGGUGUAACACUUGUCAAG | 116 | 2073 | AGGUGUAACACUUGUCAAG | 116 | 2091 | CUUGACAAGUGUUACACCU | 279 |
| 2091 | GAAGCGUUAUGUGCAGUAC | 117 | 2091 | GAAGCGUUAUGUGCAGUAC | 117 | 2109 | GUACUGCACAUAACGCUUC | 280 |
| 2109 | CUUAAUGUUUGUAAGACUU | 118 | 2109 | CUUAAUGUUUGUAAGACUU | 118 | 2127 | AAGUCUUACAAACAUUAAG | 281 |
| 2127 | UACAAAAAAAGAUUUAAAG | 119 | 2127 | UACAAAAAAAGAUUUAAAG | 119 | 2145 | CUUUAAAUCUUUUUUUGUA | 282 |
| 2145 | GUGGCAGCUUCACUCGACA | 120 | 2145 | GUGGCAGCUUCACUCGACA | 120 | 2163 | UGUCGAGUGAAGCUGCCAC | 283 |
| 2163 | AUUUGGUGAGAGAAGUACA | 121 | 2163 | AUUUGGUGAGAGAAGUACA | 121 | 2181 | UGUACUUCUCUCACCAAAU | 284 |
| 2181 | AAAGGUUGCAGUGCUGAGC | 122 | 2181 | AAAGGUUGCAGUGCUGAGC | 122 | 2199 | GCUCAGCACUGCAACCUUU | 285 |
| 2199 | CUGUGGGCGGUUUCUGGGG | 123 | 2199 | CUGUGGGCGGUUUCUGGGG | 123 | 2217 | CCCCAGAAACCGCCCACAG | 286 |
| 2217 | GAUGUCCCAGGGUGGAACU | 124 | 2217 | GAUGUCCCAGGGUGGAACU | 124 | 2235 | AGUUCCACCCUGGGACAUC | 287 |
| 2235 | UCCACAUGCUGGUGCAUAU | 125 | 2235 | UCCACAUGCUGGUGCAUAU | 125 | 2253 | AUAUGCACCAGCAUGUGGA | 288 |
| 2253 | UACGCCCUUGAGCUACUUC | 126 | 2253 | UACGCCCUUGAGCUACUUC | 126 | 2271 | GAAGUAGCUCAAGGGCGUA | 289 |
| 2271 | CAAAUGUGGUUUAUACCUC | 127 | 2271 | CAAAUGUGGUUUAUACCUC | 127 | 2289 | GAGGUAUAAACCACAUUUG | 290 |
| 2289 | CGCAGAUACAAGAAUCUUU | 128 | 2289 | CGCAGAUACAAGAAUCUUU | 128 | 2307 | AAAGAUUCUUGUAUCUGCG | 291 |
| 2307 | UAUGAAUAUACAAUUCUUU | 129 | 2307 | UAUGAAUAUACAAUUCUUU | 129 | 2325 | AAAGAAUUGUAUAUUCAUA | 292 |
| 2325 | UUUCCUUCUACAGCUUAGC | 130 | 2325 | UUUCCUUCUACAGCUUAGC | 130 | 2343 | GCUAAGCUGUAGAAGGAAA | 293 |
| 2343 | CUCCGUCUUUUCAACCACG | 131 | 2343 | CUCCGUCUUUUCAACCACG | 131 | 2361 | CGUGGUUGAAAAGACGGAG | 294 |
| 2361 | GAACAUUUAAAACCCGACC | 132 | 2361 | GAACAUUUAAAACCCGACC | 132 | 2379 | GGUCGGGUUUUAAAUGUUC | 295 |
| 2379 | CUACUAGCACUGUUCUGUC | 133 | 2379 | CUACUAGCACUGUUCUGUC | 133 | 2397 | GACAGAACAGUGCUAGUAG | 296 |
| 2397 | CCUCAAGUACUCAAAUAUU | 134 | 2397 | CCUCAAGUACUCAAAUAUU | 134 | 2415 | AAUAUUUGAGUACUUGAGG | 297 |
| 2415 | UUCUGAUACUGCUGAGUCA | 135 | 2415 | UUCUGAUACUGCUGAGUCA | 135 | 2433 | UGACUCAGCAGUAUCAGAA | 298 |
| 2433 | AGACUGUCAGAAAAAGCUA | 136 | 2433 | AGACUGUCAGAAAAAGCUA | 136 | 2451 | UAGCUUUUUCUGACAGUCU | 299 |
| 2451 | AGCACUAACUCGUGUUUGG | 137 | 2451 | AGCACUAACUCGUGUUUGG | 137 | 2469 | CCAAACACGAGUUAGUGCU | 300 |
| 2469 | GAGCUCUAUCCAUAUUUUA | 138 | 2469 | GAGCUCUAUCCAUAUUUUA | 138 | 2487 | UAAAAUAUGGAUAGAGCUC | 301 |
| 2487 | ACUGAUCUCUUUAAGUAUU | 139 | 2487 | ACUGAUCUCUUUAAGUAUU | 139 | 2505 | AAUACUUAAAGAGAUCAGU | 302 |
| 2505 | UUGUUCCUGCCACUGUGUA | 140 | 2505 | UUGUUCCUGCCACUGUGUA | 140 | 2523 | UACACAGUGGCAGGAACAA | 303 |
| 2523 | ACUGUGGAGUUGACUCGGU | 141 | 2523 | ACUGUGGAGUUGACUCGGU | 141 | 2541 | ACCGAGUCAACUCCACAGU | 304 |
| 2541 | UGUUCUGUCCCAGUGCGGU | 142 | 2541 | UGUUCUGUCCCAGUGCGGU | 142 | 2559 | ACCGCACUGGGACAGAACA | 305 |
| 2559 | UGCCUCCUCUUGACUUCCC | 143 | 2559 | UGCCUCCUCUUGACUUCCC | 143 | 2577 | GGGAAGUCAAGAGGAGGCA | 306 |
| 2577 | CCACUGCUCUCUGUGGUGA | 144 | 2577 | CCACUGCUCUCUGUGGUGA | 144 | 2595 | UCACCACAGAGAGCAGUGG | 307 |
| 2595 | AGAAAUUUGCCUUGUUCAA | 145 | 2595 | AGAAAUUUGCCUUGUUCAA | 145 | 2613 | UUGAACAAGGCAAAUUUCU | 308 |
| 2613 | AUAAUUACUGUACCCUCGC | 146 | 2613 | AUAAUUACUGUACCCUCGC | 146 | 2631 | GCGAGGGUACAGUAAUUAU | 309 |
| 2631 | CAUGACUGUUACAGCUUUC | 147 | 2631 | CAUGACUGUUACAGCUUUC | 147 | 2649 | GAAAGCUGUAACAGUCAUG | 310 |
| 2649 | CUGUGCAGAGAUGACUGUC | 148 | 2649 | CUGUGCAGAGAUGACUGUC | 148 | 2667 | GACAGUCAUCUCUGCACAG | 311 |
| 2667 | CCAAGUGCCACAUGCCUAC | 149 | 2667 | CCAAGUGCCACAUGCCUAC | 149 | 2685 | GUAGGCAUGUGGCACUUGG | 312 |
| 2685 | CGAUUGAAAUGAAAACUCU | 150 | 2685 | CGAUUGAAAUGAAAACUCU | 150 | 2703 | AGAGUUUUCAUUUCAAUCG | 313 |
| 2703 | UAUUGUUACCUCUGAGUUG | 151 | 2703 | UAUUGUUACCUCUGAGUUG | 151 | 2721 | CAACUCAGAGGUAACAAUA | 314 |
| 2721 | GUGUUCCACGGAAAAUGCU | 152 | 2721 | GUGUUCCACGGAAAAUGCU | 152 | 2739 | AGCAUUUUCCGUGGAACAC | 315 |
| 2739 | UAUCCAGCAGAUCAUUUAG | 153 | 2739 | UAUCCAGCAGAUCAUUUAG | 153 | 2757 | CUAAAUGAUCUGCUGGAUA | 316 |
| 2757 | GGAAAAAUAAUUCUAUUUU | 154 | 2757 | GGAAAAAUAAUUCUAUUUU | 154 | 2775 | AAAAUAGAAUUAUUUUUCC | 317 |
| 2775 | UUAGCUUUUCAUUUCUCAG | 155 | 2775 | UUAGCUUUUCAUUUCUCAG | 155 | 2793 | CUGAGAAAUGAAAAGCUAA | 318 |
| 2793 | GCUGUCCUUUUUUCUUGUU | 156 | 2793 | GCUGUCCUUUUUUCUUGUU | 156 | 2811 | AACAAGAAAAAAGGACAGC | 319 |
| 2811 | UUGAUUUUUGACAGCAAUG | 157 | 2811 | UUGAUUUUUGACAGCAAUG | 157 | 2829 | CAUUGCUGUCAAAAAUCAA | 320 |
| 2829 | GGAGAAUGGGUUAUAUAAA | 158 | 2829 | GGAGAAUGGGUUAUAUAAA | 158 | 2847 | UUUAUAUAACCCAUUCUCC | 321 |
| 2847 | AGACUGCCUGCUAAUAUGA | 159 | 2847 | AGACUGCCUGCUAAUAUGA | 159 | 2865 | UCAUAUUAGCAGGCAGUCU | 322 |
| 2865 | AACAGAAAUGCAUUUGUAA | 160 | 2865 | AACAGAAAUGCAUUUGUAA | 160 | 2883 | UUACAAAUGCAUUUCUGUU | 323 |
| 2883 | AUUCAUGAAAAUAAAUGUA | 161 | 2883 | AUUCAUGAAAAUAAAUGUA | 161 | 2901 | UACAUUUAUUUUCAUGAAU | 324 |
| 2901 | ACAUCUUCUAUCUUCAAAA | 162 | 2901 | ACAUCUUCUAUCUUCAAAA | 162 | 2919 | UUUUGAAGAUAGAAGAUGU | 325 |
| 2913 | UUCAAAAAAAAAAAAAAAA | 163 | 2913 | UUCAAAAAAAAAAAAAAAA | 163 | 2931 | UUUUUUUUUUUUUUUUGAA | 326 |

MAPK3 XM_055766.6

| | | | | | | | | |
|---|---|---|---|---|---|---|---|---|
| 3 | CGGGGCCUCGGGCGGGGCC | 327 | 3 | CGGGGCCUCGGGCGGGGCC | 327 | 21 | GGCCCCGCCCGAGGCCCCG | 432 |
| 21 | CGCCGUGGGGAGGAGGGCG | 328 | 21 | CGCCGUGGGGAGGAGGGCG | 328 | 39 | CGCCCUCCUCCCCACGGCG | 433 |
| 39 | GGUGGGAGGGGAGGAGUGG | 329 | 39 | GGUGGGAGGGGAGGAGUGG | 329 | 57 | CCACUCCUCCCCUCCCACC | 434 |
| 57 | GAGAUGGCGGCGGCGGCGG | 330 | 57 | GAGAUGGCGGCGGCGGCGG | 330 | 75 | CCGCCGCCGCCGCCAUCUC | 435 |
| 75 | GCUCAGGGGGGCGGGGGCG | 331 | 75 | GCUCAGGGGGGCGGGGGCG | 331 | 93 | CGCCCCCGCCCCCCUGAGC | 436 |
| 93 | GGGGAGCCCCGUAGAACCG | 332 | 93 | GGGGAGCCCCGUAGAACCG | 332 | 111 | CGGUUCUACGGGGCUCCCC | 437 |
| 111 | GAGGGGGUCGGCCCGGGGG | 333 | 111 | GAGGGGGUCGGCCCGGGGG | 333 | 129 | CCCCCGGGCCGACCCCCUC | 438 |
| 129 | GUCCCGGGGGAGGUGGAGA | 334 | 129 | GUCCCGGGGGAGGUGGAGA | 334 | 147 | UCUCCACCUCCCCCGGGAC | 439 |
| 147 | AUGGUGAAGGGGCAGCCGU | 335 | 147 | AUGGUGAAGGGGCAGCCGU | 335 | 165 | ACGGCUGCCCCUUCACCAU | 440 |
| 165 | UUCGACGUGGGCCCGCGCU | 336 | 165 | UUCGACGUGGGCCCGCGCU | 336 | 183 | AGCGCGGGCCCACGUCGAA | 441 |
| 183 | UACACGCAGUUGCAGUACA | 337 | 183 | UACACGCAGUUGCAGUACA | 337 | 201 | UGUACUGCAACUGCGUGUA | 442 |
| 201 | AUCGGCGAGGGCGCGUACG | 338 | 201 | AUCGGCGAGGGCGCGUACG | 338 | 219 | CGUACGCGCCCUCGCCGAU | 443 |
| 219 | GGCAUGGUCAGCUCGGCCU | 339 | 219 | GGCAUGGUCAGCUCGGCCU | 339 | 237 | AGGCCGAGCUGACCAUGCC | 444 |
| 237 | UAUGACCACGUGCGCAAGA | 340 | 237 | UAUGACCACGUGCGCAAGA | 340 | 255 | UCUUGCGCACGUGGUCAUA | 445 |
| 255 | ACUCGCGUGGCCAUCAAGA | 341 | 255 | ACUCGCGUGGCCAUCAAGA | 341 | 273 | UCUUGAUGGCCACGCGAGU | 446 |
| 273 | AAGAUCAGCCCCUUCGAAC | 342 | 273 | AAGAUCAGCCCCUUCGAAC | 342 | 291 | GUUCGAAGGGGCUGAUCUU | 447 |
| 291 | CAUCAGACCUACUGCCAGC | 343 | 291 | CAUCAGACCUACUGCCAGC | 343 | 309 | GCUGGCAGUAGGUCUGAUG | 448 |
| 309 | CGCACGCUCCGGGAGAUCC | 344 | 309 | CGCACGCUCCGGGAGAUCC | 344 | 327 | GGAUCUCCCGGAGCGUGCG | 449 |
| 327 | CAGAUCCUGCUGCGCUUCC | 345 | 327 | CAGAUCCUGCUGCGCUUCC | 345 | 345 | GGAAGCGCAGCAGGAUCUG | 450 |
| 345 | CGCCAUGAGAAUGUCAUCG | 346 | 345 | CGCCAUGAGAAUGUCAUCG | 346 | 363 | CGAUGACAUUCUCAUGGCG | 451 |
| 363 | GGCAUCCGAGACAUUCUGC | 347 | 363 | GGCAUCCGAGACAUUCUGC | 347 | 381 | GCAGAAUGUCUCGGAUGCC | 452 |
| 381 | CGGGCGUCCACCCUGGAAG | 348 | 381 | CGGGCGUCCACCCUGGAAG | 348 | 399 | CUUCCAGGGUGGACGCCCG | 453 |
| 399 | GCCAUGAGAGAUGUCUACA | 349 | 399 | GCCAUGAGAGAUGUCUACA | 349 | 417 | UGUAGACAUCUCUCAUGGC | 454 |
| 417 | AUUGUGCAGGACCUGAUGG | 350 | 417 | AUUGUGCAGGACCUGAUGG | 350 | 435 | CCAUCAGGUCCUGCACAAU | 455 |
| 435 | GAGACUGACCUGUACAAGU | 351 | 435 | GAGACUGACCUGUACAAGU | 351 | 453 | ACUUGUACAGGUCAGUCUC | 456 |
| 453 | UUGCUGAAAAGCCAGCAGC | 352 | 453 | UUGCUGAAAAGCCAGCAGC | 352 | 471 | GCUGCUGGCUUUUCAGCAA | 457 |
| 471 | CUGAGCAAUGACCAUAUCU | 353 | 471 | CUGAGCAAUGACCAUAUCU | 353 | 489 | AGAUAUGGUCAUUGCUCAG | 458 |
| 489 | UGCUACUUCCUCUACCAGA | 354 | 489 | UGCUACUUCCUCUACCAGA | 354 | 507 | UCUGGUAGAGGAAGUAGCA | 459 |
| 507 | AUCCUGCGGGGCCUCAAGU | 355 | 507 | AUCCUGCGGGGCCUCAAGU | 355 | 525 | ACUUGAGGCCCCGCAGGAU | 460 |
| 525 | UACAUCCACUCCGCCAACG | 356 | 525 | UACAUCCACUCCGCCAACG | 356 | 543 | CGUUGGCGGAGUGGAUGUA | 461 |
| 543 | GUGCUCCACCGAGAUCUAA | 357 | 543 | GUGCUCCACCGAGAUCUAA | 357 | 561 | UUAGAUCUCGGUGGAGCAC | 462 |
| 561 | AAGCCCUCCAACCUGCUCA | 358 | 561 | AAGCCCUCCAACCUGCUCA | 358 | 579 | UGAGCAGGUUGGAGGGCUU | 463 |
| 579 | AUCAACACCACCUGCGACC | 359 | 579 | AUCAACACCACCUGCGACC | 359 | 597 | GGUCGCAGGUGGUGUUGAU | 464 |
| 597 | CUUAAGAUUUGUGAUUUCG | 360 | 597 | CUUAAGAUUUGUGAUUUCG | 360 | 615 | CGAAAUCACAAAUCUUAAG | 465 |
| 615 | GGCCUGGCCCGGAUUGCCG | 361 | 615 | GGCCUGGCCCGGAUUGCCG | 361 | 633 | CGGCAAUCCGGGCCAGGCC | 466 |
| 633 | GAUCCUGAGCAUGACCACA | 362 | 633 | GAUCCUGAGCAUGACCACA | 362 | 651 | UGUGGUCAUGCUCAGGAUC | 467 |
| 651 | ACCGGCUUCCUGACGGAGU | 363 | 651 | ACCGGCUUCCUGACGGAGU | 363 | 669 | ACUCCGUCAGGAAGCCGGU | 468 |
| 669 | UAUGUGGCUACGCGCUGGU | 364 | 669 | UAUGUGGCUACGCGCUGGU | 364 | 687 | ACCAGCGCGUAGCCACAUA | 469 |
| 687 | UACCGGGCCCCAGAGAUCA | 365 | 687 | UACCGGGCCCCAGAGAUCA | 365 | 705 | UGAUCUCUGGGGCCCGGUA | 470 |
| 705 | AUGCUGAACUCCAAGGGCU | 366 | 705 | AUGCUGAACUCCAAGGGCU | 366 | 723 | AGCCCUUGGAGUUCAGCAU | 471 |
| 723 | UAUACCAAGUCCAUCGACA | 367 | 723 | UAUACCAAGUCCAUCGACA | 367 | 741 | UGUCGAUGGACUUGGUAUA | 472 |
| 741 | AUCUGGUCUGUGGGCUGCA | 368 | 741 | AUCUGGUCUGUGGGCUGCA | 368 | 759 | UGCAGCCCACAGACCAGAU | 473 |
| 759 | AUUCUGGCUGAGAUGCUCU | 369 | 759 | AUUCUGGCUGAGAUGCUCU | 369 | 777 | AGAGCAUCUCAGCCAGAAU | 474 |
| 777 | UCUAACCGGCCCAUCUUCC | 370 | 777 | UCUAACCGGCCCAUCUUCC | 370 | 795 | GGAAGAUGGGCCGGUUAGA | 475 |
| 795 | CCUGGCAAGCACUACCUGG | 371 | 795 | CCUGGCAAGCACUACCUGG | 371 | 813 | CCAGGUAGUGCUUGCCAGG | 476 |
| 813 | GAUCAGCUCAACCACAUUC | 372 | 813 | GAUCAGCUCAACCACAUUC | 372 | 831 | GAAUGUGGUUGAGCUGAUC | 477 |
| 831 | CUGGGCAUCCUGGGCUCCC | 373 | 831 | CUGGGCAUCCUGGGCUCCC | 373 | 849 | GGGAGCCCAGGAUGCCCAG | 478 |
| 849 | CCAUCCCAGGAGGACCUGA | 374 | 849 | CCAUCCCAGGAGGACCUGA | 374 | 867 | UCAGGUCCUCCUGGGAUGG | 479 |
| 867 | AAUUGUAUCAUCAACAUGA | 375 | 867 | AAUUGUAUCAUCAACAUGA | 375 | 885 | UCAUGUUGAUGAUACAAUU | 480 |
| 885 | AAGGCCCGAAACUACCUAC | 376 | 885 | AAGGCCCGAAACUACCUAC | 376 | 903 | GUAGGUAGUUUCGGGCCUU | 481 |
| 903 | CAGUCUCUGCCCUCCAAGA | 377 | 903 | CAGUCUCUGCCCUCCAAGA | 377 | 921 | UCUUGGAGGGCAGAGACUG | 482 |
| 921 | ACCAAGGUGGCUUGGGCCA | 378 | 921 | ACCAAGGUGGCUUGGGCCA | 378 | 939 | UGGCCCAAGCCACCUUGGU | 483 |
| 939 | AAGCUUUUCCCCAAGUCAG | 379 | 939 | AAGCUUUUCCCCAAGUCAG | 379 | 957 | CUGACUUGGGGAAAAGCUU | 484 |
| 957 | GACUCCAAAGCCCUUGACC | 380 | 957 | GACUCCAAAGCCCUUGACC | 380 | 975 | GGUCAAGGGCUUUGGAGUC | 485 |
| 975 | CUGCUGGACCGGAUGUUAA | 381 | 975 | CUGCUGGACCGGAUGUUAA | 381 | 993 | UUAACAUCCGGUCCAGCAG | 486 |
| 993 | ACCUUUAACCCCAAUAAAC | 382 | 993 | ACCUUUAACCCCAAUAAAC | 382 | 1011 | GUUUAUUGGGGUUAAAGGU | 487 |
| 1011 | CGGAUCACAGUGGAGGAAG | 383 | 1011 | CGGAUCACAGUGGAGGAAG | 383 | 1029 | CUUCCUCCACUGUGAUCCG | 488 |
| 1029 | GCGCUGGCUCACCCCUACC | 384 | 1029 | GCGCUGGCUCACCCCUACC | 384 | 1047 | GGUAGGGGUGAGCCAGCGC | 489 |
| 1047 | CUGGAGCAGUACUAUGACC | 385 | 1047 | CUGGAGCAGUACUAUGACC | 385 | 1065 | GGUCAUAGUACUGCUCCAG | 490 |
| 1065 | CCGACGGAUGAGCCAGUGG | 386 | 1065 | CCGACGGAUGAGCCAGUGG | 386 | 1083 | CCACUGGCUCAUCCGUCGG | 491 |
| 1083 | GCCGAGGAGCCCUUCACCU | 387 | 1083 | GCCGAGGAGCCCUUCACCU | 387 | 1101 | AGGUGAAGGGCUCCUCGGC | 492 |
| 1101 | UUCGCCAUGGAGCUGGAUG | 388 | 1101 | UUCGCCAUGGAGCUGGAUG | 388 | 1119 | CAUCCAGCUCCAUGGCGAA | 493 |
| 1119 | GACCUACCUAAGGAGCGGC | 389 | 1119 | GACCUACCUAAGGAGCGGC | 389 | 1137 | GCCGCUCCUUAGGUAGGUC | 494 |
| 1137 | CUGAAGGAGCUCAUCUUCC | 390 | 1137 | CUGAAGGAGCUCAUCUUCC | 390 | 1155 | GGAAGAUGAGCUCCUUCAG | 495 |
| 1155 | CAGGAGACAGCACGCUUCC | 391 | 1155 | CAGGAGACAGCACGCUUCC | 391 | 1173 | GGAAGCGUGCUGUCUCCUG | 496 |
| 1173 | CAGCCCGGAGUGCUGGAGG | 392 | 1173 | CAGCCCGGAGUGCUGGAGG | 392 | 1191 | CCUCCAGCACUCCGGGCUG | 497 |
| 1191 | GCCCCCUAGCCCAGACAGA | 393 | 1191 | GCCCCCUAGCCCAGACAGA | 393 | 1209 | UCUGUCUGGGCUAGGGGGC | 498 |
| 1209 | ACAUCUCUGCACCCUGGGG | 394 | 1209 | ACAUCUCUGCACCCUGGGG | 394 | 1227 | CCCCAGGGUGCAGAGAUGU | 499 |
| 1227 | GCCUGGAACAGAACUGGCA | 395 | 1227 | GCCUGGAACAGAACUGGCA | 395 | 1245 | UGCCAGUUCUGUUCCAGGC | 500 |
| 1245 | AAAGAGGCAAGAGGUCACU | 396 | 1245 | AAAGAGGCAAGAGGUCACU | 396 | 1263 | AGUGACCUCUUGCCUCUUU | 501 |
| 1263 | UGAGGGCCUCUGUCACCCA | 397 | 1263 | UGAGGGCCUCUGUCACCCA | 397 | 1281 | UGGGUGACAGAGGCCCUCA | 502 |
| 1281 | AGGACCUGCCUCCUGCCUG | 398 | 1281 | AGGACCUGCCUCCUGCCUG | 398 | 1299 | CAGGCAGGAGGCAGGUCCU | 503 |
| 1299 | GCCCCUCUCCCGCCAGACU | 399 | 1299 | GCCCCUCUCCCGCCAGACU | 399 | 1317 | AGUCUGGCGGGAGAGGGGC | 504 |
| 1317 | UGUUAGAAAAUGGACACUG | 400 | 1317 | UGUUAGAAAAUGGACACUG | 400 | 1335 | CAGUGUCCAUUUUCUAACA | 505 |
| 1335 | GUGCCCAGCCCGGACCUUG | 401 | 1335 | GUGCCCAGCCCGGACCUUG | 401 | 1353 | CAAGGUCCGGGCUGGGCAC | 506 |
| 1353 | GGCAGCCCAGGCCGGGGUG | 402 | 1353 | GGCAGCCCAGGCCGGGGUG | 402 | 1371 | CACCCCGGCCUGGGCUGCC | 507 |
| 1371 | GGAGCAUGGGCCUGGCCAC | 403 | 1371 | GGAGCAUGGGCCUGGCCAC | 403 | 1389 | GUGGCCAGGCCCAUGCUCC | 508 |
| 1389 | CCUCUCUCCUUUGCUGAGG | 404 | 1389 | CCUCUCUCCUUUGCUGAGG | 404 | 1407 | CCUCAGCAAAGGAGAGAGG | 509 |
| 1407 | GCCUCCAGCUUCAGGCAGG | 405 | 1407 | GCCUCCAGCUUCAGGCAGG | 405 | 1425 | CCUGCCUGAAGCUGGAGGC | 510 |
| 1425 | GCCAAGGCCUUCUCCUCCC | 406 | 1425 | GCCAAGGCCUUCUCCUCCC | 406 | 1443 | GGGAGGAGAAGGCCUUGGC | 511 |
| 1443 | CCACCCGCCCUCCCCACGG | 407 | 1443 | CCACCCGCCCUCCCCACGG | 407 | 1461 | CCGUGGGGAGGGCGGGUGG | 512 |
| 1461 | GGGCCUCGGGACCUCAGGU | 408 | 1461 | GGGCCUCGGGACCUCAGGU | 408 | 1479 | ACCUGAGGUCCCGAGGCCC | 513 |
| 1479 | UGGCCCCAGUUCAAUCUCC | 409 | 1479 | UGGCCCCAGUUCAAUCUCC | 409 | 1497 | GGAGAUUGAACUGGGGCCA | 514 |
| 1497 | CCGCUGCUGCUGCUGCGCC | 410 | 1497 | CCGCUGCUGCUGCUGCGCC | 410 | 1515 | GGCGCAGCAGCAGCAGCGG | 515 |
| 1515 | CCUUACCUUCCCCAGCGUC | 411 | 1515 | CCUUACCUUCCCCAGCGUC | 411 | 1533 | GACGCUGGGGAAGGUAAGG | 516 |
| 1533 | CCCAGUCUCUGGCAGUUCU | 412 | 1533 | CCCAGUCUCUGGCAGUUCU | 412 | 1551 | AGAACUGCCAGAGACUGGG | 517 |
| 1551 | UGGAAUGGAAGGGUUCUGG | 413 | 1551 | UGGAAUGGAAGGGUUCUGG | 413 | 1569 | CCAGAACCCUUCCAUUCCA | 518 |
| 1569 | GCUGCCCCAACCUGCUGAA | 414 | 1569 | GCUGCCCCAACCUGCUGAA | 414 | 1587 | UUCAGCAGGUUGGGGCAGC | 519 |
| 1587 | AGGGCAGAGGUGGAGGGUG | 415 | 1587 | AGGGCAGAGGUGGAGGGUG | 415 | 1605 | CACCCUCCACCUCUGCCCU | 520 |
| 1605 | GGGGGGCGCUGAGUAGGGA | 416 | 1605 | GGGGGGCGCUGAGUAGGGA | 416 | 1623 | UCCCUACUCAGCGCCCCCC | 521 |
| 1623 | ACUCAGGGCCAUGCCUGCC | 417 | 1623 | ACUCAGGGCCAUGCCUGCC | 417 | 1641 | GGCAGGCAUGGCCCUGAGU | 522 |
| 1641 | CCCCCUCAUCUCAUUCAAA | 418 | 1641 | CCCCCUCAUCUCAUUCAAA | 418 | 1659 | UUUGAAUGAGAUGAGGGGG | 523 |
| 1659 | ACCCCACCCUAGUUUCCCU | 419 | 1659 | ACCCCACCCUAGUUUCCCU | 419 | 1677 | AGGGAAACUAGGGUGGGGU | 524 |
| 1677 | UGAAGGAACAUUCCUUAGU | 420 | 1677 | UGAAGGAACAUUCCUUAGU | 420 | 1695 | ACUAAGGAAUGUUCCUUCA | 525 |
| 1695 | UCUCAAGGGCUAGCAUCCC | 421 | 1695 | UCUCAAGGGCUAGCAUCCC | 421 | 1713 | GGGAUGCUAGCCCUUGAGA | 526 |
| 1713 | CUGAGGAGCCAGGCCGGGC | 422 | 1713 | CUGAGGAGCCAGGCCGGGC | 422 | 1731 | GCCCGGCCUGGCUCCUCAG | 527 |
| 1731 | CCGAAUCCCCUCCCUGUCA | 423 | 1731 | CCGAAUCCCCUCCCUGUCA | 423 | 1749 | UGACAGGGAGGGGAUUCGG | 528 |
| 1749 | AAAGCUGUCACUUCGCGUG | 424 | 1749 | AAAGCUGUCACUUCGCGUG | 424 | 1767 | CACGCGAAGUGACAGCUUU | 529 |
| 1767 | GCCCUCGCUGCUUCUGUGU | 425 | 1767 | GCCCUCGCUGCUUCUGUGU | 425 | 1785 | ACACAGAAGCAGCGAGGGC | 530 |
| 1785 | UGUGGUGAGCAGAAGUGGA | 426 | 1785 | UGUGGUGAGCAGAAGUGGA | 426 | 1803 | UCCACUUCUGCUCACCACA | 531 |
| 1803 | AGCUGGGGGGCGUGGAGAG | 427 | 1803 | AGCUGGGGGGCGUGGAGAG | 427 | 1821 | CUCUCCACGCCCCCCAGCU | 532 |
| 1821 | GCCCGGCGCCCCUGCCACC | 428 | 1821 | GCCCGGCGCCCCUGCCACC | 428 | 1839 | GGUGGCAGGGGCGCCGGGC | 533 |
| 1839 | CUCCCUGACCCGUCUAAUA | 429 | 1839 | CUCCCUGACCCGUCUAAUA | 429 | 1857 | UAUUAGACGGGUCAGGGAG | 534 |
| 1857 | AUAUAAAUAUAGAGAUGUG | 430 | 1857 | AUAUAAAUAUAGAGAUGUG | 430 | 1875 | CACAUCUCUAUAUUUAUAU | 535 |
| 1865 | AUAGAGAUGUGUCUAUGGC | 431 | 1865 | AUAGAGAUGUGUCUAUGGC | 431 | 1883 | GCCAUAGACACAUCUCUAU | 536 |

MAPK8 NM_002750.2|

| | | | | | | | | |
|---|---|---|---|---|---|---|---|---|
| 3 | UAAUUGCUUGCCAUCAUGA | 537 | 3 | UAAUUGCUUGCCAUCAUGA | 537 | 21 | UCAUGAUGGCAAGCAAUUA | 616 |
| 21 | AGCAGAAGCAAGCGUGACA | 538 | 21 | AGCAGAAGCAAGCGUGACA | 538 | 39 | UGUCACGCUUGCUUCUGCU | 617 |
| 39 | AACAAUUUUUAUAGUGUAG | 539 | 39 | AACAAUUUUUAUAGUGUAG | 539 | 57 | CUACACUAUAAAAAUUGUU | 618 |
| 57 | GAGAUUGGAGAUUCUACAU | 540 | 57 | GAGAUUGGAGAUUCUACAU | 540 | 75 | AUGUAGAAUCUCCAAUCUC | 619 |
| 75 | UUCACAGUCCUGPAACGAU | 541 | 75 | UUCACAGUCCUGAAACGAU | 541 | 93 | AUCGUUUCAGGACUGUGAA | 620 |
| 93 | UAUCAGAAUUUAAAACCUA | 542 | 93 | UAUCAGAAUUUAAAACCUA | 542 | 111 | UAGGUUUUAAAUUCUGAUA | 621 |
| 111 | AUAGGCUCAGGAGCUCAAG | 543 | 111 | AUAGGCUCAGGAGCUCAAG | 543 | 129 | CUUGAGCUCCUGAGCCUAU | 622 |
| 129 | GGAAUAGUAUGCGCAGCUU | 544 | 129 | GGAAUAGUAUGCGCAGCUU | 544 | 147 | AAGCUGCGCAUACUAUUCC | 623 |
| 147 | UAUGAUGCCAUUCUUGAAA | 545 | 147 | UAUGAUGCCAUUCUUGAAA | 545 | 165 | UUUCAAGAAUGGCAUCAUA | 624 |
| 165 | AGAAAUGUUGCAAUCAAGA | 546 | 165 | AGAAAUGUUGCAAUCAAGA | 546 | 183 | UCUUGAUUGCAACAUUUCU | 625 |
| 183 | AAGCUAAGCCGACCAUUUC | 547 | 183 | AAGCUAAGCCGACCAUUUC | 547 | 201 | GAAAUGGUCGGCUUAGCUU | 626 |
| 201 | CAGAAUCAGACUCAUGCCA | 548 | 201 | CAGAAUCAGACUCAUGCCA | 548 | 219 | UGGCAUGAGUCUGAUUCUG | 627 |
| 219 | AAGCGGGCCUACAGAGAGC | 549 | 219 | AAGCGGGCCUACAGAGAGC | 549 | 237 | GCUCUCUGUAGGCCCGCUU | 628 |
| 237 | CUAGUUCUUAUGAAAUGUG | 550 | 237 | CUAGUUCUUAUGAAAUGUG | 550 | 255 | CACAUUUCAUAAGAACUAG | 629 |
| 255 | GUUAAUCACAAAAAUAUAA | 551 | 255 | GUUAAUCACAAAAAUAUAA | 551 | 273 | UUAUAUUUUUGUGAUUAAC | 630 |
| 273 | AUUGGCCUUUUGAAUGUUU | 552 | 273 | AUUGGCCUUUUGAAUGUUU | 552 | 291 | AAACAUUCAAAAGGCCAAU | 631 |
| 291 | UUCACACCACAGAAAUCCC | 553 | 291 | UUCACACCACAGAAAUCCC | 553 | 309 | GGGAUUUCUGUGGUGUGAA | 632 |
| 309 | CUAGAAGAAUUUCAAGAUG | 554 | 309 | CUAGAAGAAUUUCAAGAUG | 554 | 327 | CAUCUUGAAAUUCUUCUAG | 633 |
| 327 | GUUUACAUAGUCAUGGAGC | 555 | 327 | GUUUACAUAGUCAUGGAGC | 555 | 345 | GCUCCAUGACUAUGUAAAC | 634 |
| 345 | CUCAUGGAUGCAAAUCUUU | 556 | 345 | CUCAUGGAUGCAAAUCUUU | 556 | 363 | AAAGAUUUGCAUCCAUGAG | 635 |
| 363 | UGCCAAGUGAUUCAGAUGG | 557 | 363 | UGCCAAGUGAUUCAGAUGG | 557 | 381 | CCAUCUGAAUCACUUGGCA | 636 |
| 381 | GAGCUAGAUCAUGAAAGAA | 558 | 381 | GAGCUAGAUCAUGAAAGAA | 558 | 399 | UUCUUUCAUGAUCUAGCUC | 637 |
| 399 | AUGUCCUACCUUCUCUAUC | 559 | 399 | AUGUCCUACCUUCUCUAUC | 559 | 417 | GAUAGAGAAGGUAGGACAU | 638 |
| 417 | CAGAUGCUGUGUGGAAUCA | 560 | 417 | CAGAUGCUGUGUGGAAUCA | 560 | 435 | UGAUUCCACACAGCAUCUG | 639 |
| 435 | AAGCACCUUCAUUCUGCUG | 561 | 435 | AAGCACCUUCAUUCUGCUG | 561 | 453 | CAGCAGAAUGAAGGUGCUU | 640 |
| 453 | GGAAUUAUUCAUCGGGACU | 562 | 453 | GGAAUUAUUCAUCGGGACU | 562 | 471 | AGUCCCGAUGAAUAAUUCC | 641 |
| 471 | UUAAAGCCCAGUAAUAUAG | 563 | 471 | UUAAAGCCCAGUAAUAUAG | 563 | 489 | CUAUAUUACUGGGCUUUAA | 642 |
| 489 | GUAGUAAAAUCUGAUUGCA | 564 | 489 | GUAGUAAAAUCUGAUUGCA | 564 | 507 | UGCAAUCAGAUUUUACUAC | 643 |
| 507 | ACUUUGAAGAUUCUUGACU | 565 | 507 | ACUUUGAAGAUUCUUGACU | 565 | 525 | AGUCAAGAAUCUUCAAAGU | 644 |
| 525 | UUCGGUCUGGCCAGGACUG | 566 | 525 | UUCGGUCUGGCCAGGACUG | 566 | 543 | CAGUCCUGGCCAGACCGAA | 645 |
| 543 | GCAGGAACGAGUUUUAUGA | 567 | 543 | GCAGGAACGAGUUUUAUGA | 567 | 561 | UCAUAAAACUCGUUCCUGC | 646 |
| 561 | AUGACGCCUUAUGUAGUGA | 568 | 561 | AUGACGCCUUAUGUAGUGA | 568 | 579 | UCACUACAUAAGGCGUCAU | 647 |
| 579 | ACUCGCUACUACAGAGCAC | 569 | 579 | ACUCGCUACUACAGAGCAC | 569 | 597 | GUGCUCUGUAGUAGCGAGU | 648 |
| 597 | CCCGAGGUCAUCCUUGGCA | 570 | 597 | CCCGAGGUCAUCCUUGGCA | 570 | 615 | UGCCAAGGAUGACCUCGGG | 649 |
| 615 | AUGGGCUACAAGGAAAACG | 571 | 615 | AUGGGCUACAAGGAAAACG | 571 | 633 | CGUUUUCCUUGUAGCCCAU | 650 |
| 633 | GUGGAUUUAUGGUCUGUGG | 572 | 633 | GUGGAUUUAUGGUCUGUGG | 572 | 651 | CCACAGACCAUAAAUCCAC | 651 |
| 651 | GGGUGCAUUAUGGGAGAAA | 573 | 651 | GGGUGCAUUAUGGGAGAAA | 573 | 669 | UUUCUCCCAUAAUGCACCC | 652 |
| 669 | AUGGUUUGCCACAAAAUCC | 574 | 669 | AUGGUUUGCCACAAAAUCC | 574 | 687 | GGAUUUUGUGGCAAACCAU | 653 |
| 687 | CUCUUUCCAGGAAGGGACU | 575 | 687 | CUCUUUCCAGGAAGGGACU | 575 | 705 | AGUCCCUUCCUGGAAAGAG | 654 |
| 705 | UAUAUUGAUCAGUGGAAUA | 576 | 705 | UAUAUUGAUCAGUGGAAUA | 576 | 723 | UAUUCCACUGAUCAAUAUA | 655 |
| 723 | AAAGUUAUUGAACAGCUUG | 577 | 723 | AAAGUUAUUGAACAGCUUG | 577 | 741 | CAAGCUGUUCAAUAACUUU | 656 |
| 741 | GGAACACCAUGUCCUGAAU | 578 | 741 | GGAACACCAUGUCCUGAAU | 578 | 759 | AUUCAGGACAUGGUGUUCC | 657 |
| 759 | UUCAUGAAGAAACUGCAAC | 579 | 759 | UUCAUGAAGAAACUGCAAC | 579 | 777 | GUUGCAGUUUCUUCAUGAA | 658 |
| 777 | CCAACAGUAAGGACUUACG | 580 | 777 | CCAACAGUAAGGACUUACG | 580 | 795 | CGUAAGUCCUUACUGUUGG | 659 |
| 795 | GUUGAAAACAGACCUAAAU | 581 | 795 | GUUGAAAACAGACCUAAAU | 581 | 813 | AUUUAGGUCUGUUUUCAAC | 660 |
| 813 | UAUGCUGGAUAUAGCUUUG | 582 | 813 | UAUGCUGGAUAUAGCUUUG | 582 | 831 | CAAAGCUAUAUCCAGCAUA | 661 |
| 831 | GAGAAACUCUUCCCUGAUG | 583 | 831 | GAGAAACUCUUCCCUGAUG | 583 | 849 | CAUCAGGGAAGAGUUUCUC | 662 |
| 849 | GUCCUUUUCCCAGCUGACU | 584 | 849 | GUCCUUUUCCCAGCUGACU | 584 | 867 | AGUCAGCUGGGAAAAGGAC | 663 |
| 867 | UCAGAACACAACAAACUUA | 585 | 867 | UCAGAACACAACAAACUUA | 585 | 885 | UAAGUUUGUUGUGUUCUGA | 664 |
| 885 | AAAGCCAGUCAGGCAAGGG | 586 | 885 | AAAGCCAGUCAGGCAAGGG | 586 | 903 | CCCUUGCCUGACUGGCUUU | 665 |
| 903 | GAUUUGUUAUCCAAAAUGC | 587 | 903 | GAUUUGUUAUCCAAAAUGC | 587 | 921 | GCAUUUUGGAUAACAAAUC | 666 |
| 921 | CUGGUAAUAGAUGCAUCUA | 588 | 921 | CUGGUAAUAGAUGCAUCUA | 588 | 939 | UAGAUGCAUCUAUUACCAG | 667 |
| 939 | AAAAGGAUCUCUGUAGAUG | 589 | 939 | AAAAGGAUCUCUGUAGAUG | 589 | 957 | CAUCUACAGAGAUCCUUUU | 668 |
| 957 | GAAGCUCUCCAACACCCGU | 590 | 957 | GAAGCUCUCCAACACCCGU | 590 | 975 | ACGGGUGUUGGAGAGCUUC | 669 |
| 975 | UACAUCAAUGUCUGGUAUG | 591 | 975 | UACAUCAAUGUCUGGUAUG | 591 | 993 | CAUACCAGACAUUGAUGUA | 670 |
| 993 | GAUCCUUCUGAAGCAGAAG | 592 | 993 | GAUCCUUCUGAAGCAGAAG | 592 | 1011 | CUUCUGCUUCAGAAGGAUC | 671 |
| 1011 | GCUCCACCACCAAAGAUCC | 593 | 1011 | GCUCCACCACCAAAGAUCC | 593 | 1029 | GGAUCUUUGGUGGUGGAGC | 672 |
| 1029 | CCUGACAAGCAGUUAGAUG | 594 | 1029 | CCUGACAAGCAGUUAGAUG | 594 | 1047 | CAUCUAACUGCUUGUCAGG | 673 |
| 1047 | GAAAGGGAACACACAAUAG | 595 | 1047 | GAAAGGGAACACACAAUAG | 595 | 1065 | CUAUUGUGUGUUCCCUUUC | 674 |
| 1065 | GAAGAGUGGAAAGAAUUGA | 596 | 1065 | GAAGAGUGGAAAGAAUUGA | 596 | 1083 | UCAAUUCUUUCCACUCUUC | 675 |
| 1083 | AUAUAUAAGGAAGUUAUGG | 597 | 1083 | AUAUAUAAGGAAGUUAUGG | 597 | 1101 | CCAUAACUUCCUUAUAUAU | 676 |
| 1101 | GACUUGGAGGAGAGAACCA | 598 | 1101 | GACUUGGAGGAGAGAACCA | 598 | 1119 | UGGUUCUCUCCUCCAAGUC | 677 |
| 1119 | AAGAAUGGAGUUAUACGGG | 599 | 1119 | AAGAAUGGAGUUAUACGGG | 599 | 1137 | CCCGUAUAACUCCAUUCUU | 678 |
| 1137 | GGGCAGCCCUCUCCUUUAG | 600 | 1137 | GGGCAGCCCUCUCCUUUAG | 600 | 1155 | CUAAAGGAGAGGGCUGCCC | 679 |
| 1155 | GCACAGGUGCAGCAGUGAU | 601 | 1155 | GCACAGGUGCAGCAGUGAU | 601 | 1173 | AUCACUGCUGCACCUGUGC | 680 |
| 1173 | UCAAUGGCUCUCAGCAUCC | 602 | 1173 | UCAAUGGCUCUCAGCAUCC | 602 | 1191 | GGAUGCUGAGAGCCAUUGA | 681 |
| 1191 | CAUCAUCAUCGUCGUCUGU | 603 | 1191 | CAUCAUCAUCGUCGUCUGU | 603 | 1209 | ACAGACGACGAUGAUGAUG | 682 |
| 1209 | UCAAUGAUGUGUCUUCAAU | 604 | 1209 | UCAAUGAUGUGUCUUCAAU | 604 | 1227 | AUUGAAGACACAUCAUUGA | 683 |
| 1227 | UGUCAACAGAUCCGACUUU | 605 | 1227 | UGUCAACAGAUCCGACUUU | 605 | 1245 | AAAGUCGGAUCUGUUGACA | 684 |
| 1245 | UGGCCUCUGAUACAGACAG | 606 | 1245 | UGGCCUCUGAUACAGACAG | 606 | 1263 | CUGUCUGUAUCAGAGGCCA | 685 |
| 1263 | GCAGUCUAGAAGCAGCAGC | 607 | 1263 | GCAGUCUAGAAGCAGCAGC | 607 | 1281 | GCUGCUGCUUCUAGACUGC | 686 |
| 1281 | CUGGGCCUCUGGGCUGCUG | 608 | 1281 | CUGGGCCUCUGGGCUGCUG | 608 | 1299 | CAGCAGCCCAGAGGCCCAG | 687 |
| 1299 | GUAGAUGACUACUUGGGCC | 609 | 1299 | GUAGAUGACUACUUGGGCC | 609 | 1317 | GGCCCAAGUAGUCAUCUAC | 688 |
| 1317 | CAUCGGGGGGUGGGAGGGA | 610 | 1317 | CAUCGGGGGGUGGGAGGGA | 610 | 1335 | UCCCUCCCACCCCCCGAUG | 689 |
| 1335 | AUGGGGAGUCGGUUAGUCA | 611 | 1335 | AUGGGGAGUCGGUUAGUCA | 611 | 1353 | UGACUAACCGACUCCCCAU | 690 |
| 1353 | AUUGAUAGAACUACUUUGA | 612 | 1353 | AUUGAUAGAACUACUUUGA | 612 | 1371 | UCAAAGUAGUUCUAUCAAU | 691 |
| 1371 | AAAACAAUUCAGUGGUCUU | 613 | 1371 | AAAACAAUUCAGUGGUCUU | 613 | 1389 | AAGACCACUGAAUUGUUUU | 692 |
| 1389 | UAUUUUUGGGUGAUUUUUC | 614 | 1389 | UAUUUUUGGGUGAUUUUUC | 614 | 1407 | GAAAAAUCACCCAAAAAUA | 693 |
| 1397 | GGUGAUUUUUCAAAAAAUG | 615 | 1397 | GGUGAUUUUUCAAAAAAUG | 615 | 1415 | CAUUUUUUGAAAAAUCACC | 694 |

MAPK14-2 NM_139012

| | | | | | | | | |
|---|---|---|---|---|---|---|---|---|
| 3 | AACCGCGACCACUGGAGCC | 695 | 3 | AACCGCGACCACUGGAGCC | 695 | 21 | GGCUCCAGUGGUCGCGGUU | 904 |
| 21 | CUUAGCGGGCGCAGCAGCU | 696 | 21 | CUUAGCGGGCGCAGCAGCU | 696 | 39 | AGCUGCUGCGCCCGCUAAG | 905 |
| 39 | UGGAACGGGAGUACUGCGA | 697 | 39 | UGGAACGGGAGUACUGCGA | 697 | 57 | UCGCAGUACUCCCGUUCCA | 906 |
| 57 | ACGCAGCCCGGAGUCGGCC | 698 | 57 | ACGCAGCCCGGAGUCGGCC | 698 | 75 | GGCCGACUCCGGGCUGCGU | 907 |
| 75 | CUUGUAGGGGCGAAGGUGC | 699 | 75 | CUUGUAGGGGCGAAGGUGC | 699 | 93 | GCACCUUCGCCCCUACAAG | 908 |
| 93 | CAGGGAGAUCGCGGCGGGC | 700 | 93 | CAGGGAGAUCGCGGCGGGC | 700 | 111 | GCCCGCCGCGAUCUCCCUG | 909 |
| 111 | CGCAGUCUUGAGCGCCGGA | 701 | 111 | CGCAGUCUUGAGCGCCGGA | 701 | 129 | UCCGGCGCUCAAGACUGCG | 910 |
| 129 | AGCGCGUCCCUGCCCUUAG | 702 | 129 | AGCGCGUCCCUGCCCUUAG | 702 | 147 | CUAAGGGCAGGGACGCGCU | 911 |
| 147 | GCGGGGCUUGCCCCAGUCG | 703 | 147 | GCGGGGCUUGCCCCAGUCG | 703 | 165 | CGACUGGGGCAAGCCCCGC | 912 |
| 165 | GCAGGGGCACAUCCAGCCG | 704 | 165 | GCAGGGGCACAUCCAGCCG | 704 | 183 | CGGCUGGAUGUGCCCCUGC | 913 |
| 183 | GCUGCGGCUGACAGCAGCC | 705 | 183 | GCUGCGGCUGACAGCAGCC | 705 | 201 | GGCUGCUGUCAGCCGCAGC | 914 |
| 201 | CGCGCGCGCGGGAGUCUGC | 706 | 201 | CGCGCGCGCGGGAGUCUGC | 706 | 219 | GCAGACUCCCGCGCGCGCG | 915 |
| 219 | CGGGGUCGCGGCAGCCGCA | 707 | 219 | CGGGGUCGCGGCAGCCGCA | 707 | 237 | UGCGGCUGCCGCGACCCCG | 916 |
| 237 | ACCUGCGCGGGCGACCAGC | 708 | 237 | ACCUGCGCGGGCGACCAGC | 708 | 255 | GCUGGUCGCCCGCGCAGGU | 917 |
| 255 | CGCAAGGUCCCCGCCCGGC | 709 | 255 | CGCAAGGUCCCCGCCCGGC | 709 | 273 | GCCGGGCGGGGACCUUGCG | 918 |
| 273 | CUGGGCGGGCAGCAAGGGC | 710 | 273 | CUGGGCGGGCAGCAAGGGC | 710 | 291 | GCCCUUGCUGCCCGCCCAG | 919 |
| 291 | CCGGGGAGAGGGUGCGGGU | 711 | 291 | CCGGGGAGAGGGUGCGGGU | 711 | 309 | ACCCGCACCCUCUCCCCGG | 920 |
| 309 | UGCAGGCGGGGGCCCCACA | 712 | 309 | UGCAGGCGGGGGCCCCACA | 712 | 327 | UGUGGGGCCCCCGCCUGCA | 921 |
| 327 | AGGGCCACCUUCUUGCCCG | 713 | 327 | AGGGCCACCUUCUUGCCCG | 713 | 345 | CGGGCAAGAAGGUGGCCCU | 922 |
| 345 | GGCGGCUGCCGCUGGAAAA | 714 | 345 | GGCGGCUGCCGCUGGAAAA | 714 | 363 | UUUUCCAGCGGCAGCCGCC | 923 |
| 363 | AUGUCUCAGGAGAGGCCCA | 715 | 363 | AUGUCUCAGGAGAGGCCCA | 715 | 381 | UGGGCCUCUCCUGAGACAU | 924 |
| 381 | ACGUUCUACCGGCAGGAGC | 716 | 381 | ACGUUCUACCGGCAGGAGC | 716 | 399 | GCUCCUGCCGGUAGAACGU | 925 |
| 399 | CUGAACAAGACAAUCUGGG | 717 | 399 | CUGAACAAGACAAUCUGGG | 717 | 417 | CCCAGAUUGUCUUGUUCAG | 926 |
| 417 | GAGGUGCCCGAGCGUUACC | 718 | 417 | GAGGUGCCCGAGCGUUACC | 718 | 435 | GGUAACGCUCGGGCACCUC | 927 |
| 435 | CAGAACCUGUCUCCAGUGG | 719 | 435 | CAGAACCUGUCUCCAGUGG | 719 | 453 | CCACUGGAGACAGGUUCUG | 928 |
| 453 | GGCUCUGGCGCCUAUGGCU | 720 | 453 | GGCUCUGGCGCCUAUGGCU | 720 | 471 | AGCCAUAGGCGCCAGAGCC | 929 |
| 471 | UCUGUGUGUGCUGCUUUUG | 721 | 471 | UCUGUGUGUGCUGCUUUUG | 721 | 489 | CAAAAGCAGCACACACAGA | 930 |
| 489 | GACACAAAAACGGGGUUAC | 722 | 489 | GACACAAAAACGGGGUUAC | 722 | 507 | GUAACCCCGUUUUUGUGUC | 931 |
| 507 | CGUGUGGCAGUGAAGAAGC | 723 | 507 | CGUGUGGCAGUGAAGAAGC | 723 | 525 | GCUUCUUCACUGCCACACG | 932 |
| 525 | CUCUCCAGACCAUUUCAGU | 724 | 525 | CUCUCCAGACCAUUUCAGU | 724 | 543 | ACUGAAAUGGUCUGGAGAG | 933 |
| 543 | UCCAUCAUUCAUGCGAAAA | 725 | 543 | UCCAUCAUUCAUGCGAAAA | 725 | 561 | UUUUCGCAUGAAUGAUGGA | 934 |
| 561 | AGAACCUACAGAGAACUGC | 726 | 561 | AGAACCUACAGAGAACUGC | 726 | 579 | GCAGUUCUCUGUAGGUUCU | 935 |
| 579 | CGGUUACUUAAACAUAUGA | 727 | 579 | CGGUUACUUAAACAUAUGA | 727 | 597 | UCAUAUGUUUAAGUAACCG | 936 |
| 597 | AAACAUGAAAAUGUGAUUG | 728 | 597 | AAACAUGAAAAUGUGAUUG | 728 | 615 | CAAUCACAUUUUCAUGUUU | 937 |
| 615 | GGUCUGUUGGACGUUUUUA | 729 | 615 | GGUCUGUUGGACGUUUUUA | 729 | 633 | UAAAAACGUCCAACAGACC | 938 |
| 633 | ACACCUGCAAGGUCUCUGG | 730 | 633 | ACACCUGCAAGGUCUCUGG | 730 | 651 | CCAGAGACCUUGCAGGUGU | 939 |
| 651 | GAGGAAUUCAAUGAUGUGU | 731 | 651 | GAGGAAUUCAAUGAUGUGU | 731 | 669 | ACACAUCAUUGAAUUCCUC | 940 |
| 669 | UAUCUGGUGACCCAUCUCA | 732 | 669 | UAUCUGGUGACCCAUCUCA | 732 | 687 | UGAGAUGGGUCACCAGAUA | 941 |
| 687 | AUGGGGGCAGAUCUGAACA | 733 | 687 | AUGGGGGCAGAUCUGAACA | 733 | 705 | UGUUCAGAUCUGCCCCCAU | 942 |
| 705 | AACAUUGUGAAAUGUCAGA | 734 | 705 | AACAUUGUGAAAUGUCAGA | 734 | 723 | UCUGACAUUUCACAAUGUU | 943 |
| 723 | AAGCUUACAGAUGACCAUG | 735 | 723 | AAGCUUACAGAUGACCAUG | 735 | 741 | CAUGGUCAUCUGUAAGCUU | 944 |
| 741 | GUUCAGUUCCUUAUCUACC | 736 | 741 | GUUCAGUUCCUUAUCUACC | 736 | 759 | GGUAGAUAAGGAACUGAAC | 945 |
| 759 | CAAAUUCUCCGAGGUCUAA | 737 | 759 | CAAAUUCUCCGAGGUCUAA | 737 | 777 | UUAGACCUCGGAGAAUUUG | 946 |
| 777 | AAGUAUAUACAUUCAGCUG | 738 | 777 | AAGUAUAUACAUUCAGCUG | 738 | 795 | CAGCUGAAUGUAUAUACUU | 947 |
| 795 | GACAUAAUUCACAGGGACC | 739 | 795 | GACAUAAUUCACAGGGACC | 739 | 813 | GGUCCCUGUGAAUUAUGUC | 948 |
| 813 | CUAAAACCUAGUAAUCUAG | 740 | 813 | CUAPAACCUAGUAAUCUAG | 740 | 831 | CUAGAUUACUAGGUUUUAG | 949 |
| 831 | GCUGUGAAUGAAGACUGUG | 741 | 831 | GCUGUGAAUGAAGACUGUG | 741 | 849 | CACAGUCUUCAUUCACAGC | 950 |
| 849 | GAGCUGAAGAUUCUGGAUU | 742 | 849 | GAGCUGAAGAUUCUGGAUU | 742 | 867 | AAUCCAGAAUCUUCAGCUC | 951 |
| 867 | UUUGGACUGGCUCGGCACA | 743 | 867 | UUUGGACUGGCUCGGCACA | 743 | 885 | UGUGCCGAGCCAGUCCAAA | 952 |
| 885 | ACAGAUGAUGAAAUGACAG | 744 | 885 | ACAGAUGAUGAAAUGACAG | 744 | 903 | CUGUCAUUUCAUCAUCUGU | 953 |
| 903 | GGCUACGUGGCCACUAGGU | 745 | 903 | GGCUACGUGGCCACUAGGU | 745 | 921 | ACCUAGUGGCCACGUAGCC | 954 |
| 921 | UGGUACAGGGCUCCUGAGA | 746 | 921 | UGGUACAGGGCUCCUGAGA | 746 | 939 | UCUCAGGAGCCCUGUACCA | 955 |
| 939 | AUCAUGCUGAACUGGAUGC | 747 | 939 | AUCAUGCUGAACUGGAUGC | 747 | 957 | GCAUCCAGUUCAGCAUGAU | 956 |
| 957 | CAUUACAACCAGACAGUUG | 748 | 957 | CAUUACAACCAGACAGUUG | 748 | 975 | CAACUGUCUGGUUGUAAUG | 957 |
| 975 | GAUAUUUGGUCAGUGGGAU | 749 | 975 | GAUAUUUGGUCAGUGGGAU | 749 | 993 | AUCCCACUGACCAAAUAUC | 958 |
| 993 | UGCAUAAUGGCCGAGCUGU | 750 | 993 | UGCAUAAUGGCCGAGCUGU | 750 | 1011 | ACAGCUCGGCCAUUAUGCA | 959 |
| 1011 | UUGACUGGAAGAACAUUGU | 751 | 1011 | UUGACUGGAAGAACAUUGU | 751 | 1029 | ACAAUGUUCUUCCAGUCAA | 960 |
| 1029 | UUUCCUGGUACAGACCAUA | 752 | 1029 | UUUCCUGGUACAGACCAUA | 752 | 1047 | UAUGGUCUGUACCAGGAAA | 961 |
| 1047 | AUUGAUCAGUUGAAGCUCA | 753 | 1047 | AUUGAUCAGUUGAAGCUCA | 753 | 1065 | UGAGCUUCAACUGAUCAAU | 962 |
| 1065 | AUUUUAAGACUCGUUGGAA | 754 | 1065 | AUUUUAAGACUCGUUGGAA | 754 | 1083 | UUCCAACGAGUCUUAAAAU | 963 |
| 1083 | ACCCCAGGGGCUGAGCUUU | 755 | 1083 | ACCCCAGGGGCUGAGCUUU | 755 | 1101 | AAAGCUCAGCCCCUGGGGU | 964 |
| 1101 | UUGAAGAAAAUCUCCUCAG | 756 | 1101 | UUGAAGAAAAUCUCCUCAG | 756 | 1119 | CUGAGGAGAUUUUCUUCAA | 965 |
| 1119 | GAGUCUGCAAGAAACUAUA | 757 | 1119 | GAGUCUGCAAGAAACUAUA | 757 | 1137 | UAUAGUUUCUUGCAGACUC | 966 |
| 1137 | AUUCAGUCUUUGACUCAGA | 758 | 1137 | AUUCAGUCUUUGACUCAGA | 758 | 1155 | UCUGAGUCAAAGACUGAAU | 967 |
| 1155 | AUGCCGAAGAUGAACUUUG | 759 | 1155 | AUGCCGAAGAUGAACUUUG | 759 | 1173 | CAAAGUUCAUCUUCGGCAU | 968 |
| 1173 | GCGAAUGUAUUUAUUGGUG | 760 | 1173 | GCGAAUGUAUUUAUUGGUG | 760 | 1191 | CACCAAUAAAUACAUUCGC | 969 |
| 1191 | GCCAAUCCCCUGGCUGUCG | 761 | 1191 | GCCAAUCCCCUGGCUGUCG | 761 | 1209 | CGACAGCCAGGGGAUUGGC | 970 |
| 1209 | GACUUGCUGGAGAAGAUGC | 762 | 1209 | GACUUGCUGGAGAAGAUGC | 762 | 1227 | GCAUCUUCUCCAGCAAGUC | 971 |
| 1227 | CUUGUAUUGGACUCAGAUA | 763 | 1227 | CUUGUAUUGGACUCAGAUA | 763 | 1245 | UAUCUGAGUCCAAUACAAG | 972 |
| 1245 | AAGAGAAUUACAGCGGCCC | 764 | 1245 | AAGAGAAUUACAGCGGCCC | 764 | 1263 | GGGCCGCUGUAAUUCUCUU | 973 |
| 1263 | CAAGCCCUUGCACAUGCCU | 765 | 1263 | CAAGCCCUUGCACAUGCCU | 765 | 1281 | AGGCAUGUGCAAGGGCUUG | 974 |
| 1281 | UACUUUGCUCAGUACCACG | 766 | 1281 | UACUUUGCUCAGUACCACG | 766 | 1299 | CGUGGUACUGAGCAAAGUA | 975 |
| 1299 | GAUCCUGAUGAUGAACCAG | 767 | 1299 | GAUCCUGAUGAUGAACCAG | 767 | 1317 | CUGGUUCAUCAUCAGGAUC | 976 |
| 1317 | GUGGCCGAUCCUUAUGAUC | 768 | 1317 | GUGGCCGAUCCUUAUGAUC | 768 | 1335 | GAUCAUAAGGAUCGGCCAC | 977 |
| 1335 | CAGUCCUUUGAAAGCAGGG | 769 | 1335 | CAGUCCUUUGAAAGCAGGG | 769 | 1353 | CCCUGCUUUCAAAGGACUG | 978 |
| 1353 | GACCUCCUUAUAGAUGAGU | 770 | 1353 | GACCUCCUUAUAGAUGAGU | 770 | 1371 | ACUCAUCUAUAAGGAGGUC | 979 |
| 1371 | UGGAAAAGCCUGACCUAUG | 771 | 1371 | UGGAAAAGCCUGACCUAUG | 771 | 1389 | CAUAGGUCAGGCUUUUCCA | 980 |
| 1389 | GAUGAAGUCAUCAGCUUUG | 772 | 1389 | GAUGAAGUCAUCAGCUUUG | 772 | 1407 | CAAAGCUGAUGACUUCAUC | 981 |
| 1407 | GUGCCACCACCCCUUGACC | 773 | 1407 | GUGCCACCACCCCUUGACC | 773 | 1425 | GGUCAAGGGGUGGUGGCAC | 982 |
| 1425 | CAAGAAGAGAUGGAGUCCU | 774 | 1425 | CAAGAAGAGAUGGAGUCCU | 774 | 1443 | AGGACUCCAUCUCUUCUUG | 983 |
| 1443 | UGAGCACCUGGUUUCUGUU | 775 | 1443 | UGAGCACCUGGUUUCUGUU | 775 | 1461 | AACAGAAACCAGGUGCUCA | 984 |
| 1461 | UCUGUUGAUCCCACUUCAC | 776 | 1461 | UCUGUUGAUCCCACUUCAC | 776 | 1479 | GUGAAGUGGGAUCAACAGA | 985 |
| 1479 | CUGUGAGGGGAAGGCCUUU | 777 | 1479 | CUGUGAGGGGAAGGCCUUU | 777 | 1497 | AAAGGCCUUCCCCUCACAG | 986 |
| 1497 | UUCACGGGAACUCUCCAAA | 778 | 1497 | UUCACGGGAACUCUCCAAA | 778 | 1515 | UUUGGAGAGUUCCCGUGAA | 987 |
| 1515 | AUAUUAUUCAAGUGCCUCU | 779 | 1515 | AUAUUAUUCAAGUGCCUCU | 779 | 1533 | AGAGGCACUUGAAUAAUAU | 988 |
| 1533 | UUGUUGCAGAGAUUUCCUC | 780 | 1533 | UUGUUGCAGAGAUUUCCUC | 780 | 1551 | GAGGAAAUCUCUGCAACAA | 989 |
| 1551 | CCAUGGUGGAAGGGGGUGU | 781 | 1551 | CCAUGGUGGAAGGGGGUGU | 781 | 1569 | ACACCCCCUUCCACCAUGG | 990 |
| 1569 | UGCGUGCGUGUGCGUGCGU | 782 | 1569 | UGCGUGCGUGUGCGUGCGU | 782 | 1587 | ACGCACGCACACGCACGCA | 991 |
| 1587 | UGUUAGUGUGUGUGCAUGU | 783 | 1587 | UGUUAGUGUGUGUGCAUGU | 783 | 1605 | ACAUGCACACACACUAACA | 992 |
| 1605 | UGUGUGUCUGUCUUUGUGG | 784 | 1605 | UGUGUGUCUGUCUUUGUGG | 784 | 1623 | CCACAAAGACAGACACACA | 993 |
| 1623 | GGAGGGUAAGACAAUAUGA | 785 | 1623 | GGAGGGUAAGACAAUAUGA | 785 | 1641 | UCAUAUUGUCUUACCCUCC | 994 |
| 1641 | AACAAACUAUGAUCACAGU | 786 | 1641 | AACAAACUAUGAUCACAGU | 786 | 1659 | ACUGUGAUCAUAGUUUGUU | 995 |
| 1659 | UGACUUUACAGGAGGUUGU | 787 | 1659 | UGACUUUACAGGAGGUUGU | 787 | 1677 | ACAACCUCCUGUAAAGUCA | 996 |
| 1677 | UGGAUGCUCCAGGGCAGCC | 788 | 1677 | UGGAUGCUCCAGGGCAGCC | 788 | 1695 | GGCUGCCCUGGAGCAUCCA | 997 |
| 1695 | CUCCACCUUGCUCUUCUUU | 789 | 1695 | CUCCACCUUGCUCUUCUUU | 789 | 1713 | AAAGAAGAGCAAGGUGGAG | 998 |
| 1713 | UCUGAGAGUUGGCUCAGGC | 790 | 1713 | UCUGAGAGUUGGCUCAGGC | 790 | 1731 | GCCUGAGCCAACUCUCAGA | 999 |
| 1731 | CAGACAAGAGCUGCUGUCC | 791 | 1731 | CAGACAAGAGCUGCUGUCC | 791 | 1749 | GGACAGCAGCUCUUGUCUG | 1000 |
| 1749 | CUUUUAGGAAUAUGUUCAA | 792 | 1749 | CUUUUAGGAAUAUGUUCAA | 792 | 1767 | UUGAACAUAUUCCUAAAAG | 1001 |
| 1767 | AUGCAAAGUAAAAAAAUAU | 793 | 1767 | AUGCAAAGUAAAAAAAUAU | 793 | 1785 | AUAUUUUUUUACUUUGCAU | 1002 |
| 1785 | UGAAUUGUCCCCAAUCCCG | 794 | 1785 | UGAAUUGUCCCCAAUCCCG | 794 | 1803 | CGGGAUUGGGGACAAUUCA | 1003 |
| 1803 | GGUCAUGCUUUUGCCACUU | 795 | 1803 | GGUCAUGCUUUUGCCACUU | 795 | 1821 | AAGUGGCAAAAGCAUGACC | 1004 |
| 1821 | UUGGCUUCUCCUGUGACCC | 796 | 1821 | UUGGCUUCUCCUGUGACCC | 796 | 1839 | GGGUCACAGGAGAAGCCAA | 1005 |
| 1839 | CCACCUUGACGGUGGGGCG | 797 | 1839 | CCACCUUGACGGUGGGGCG | 797 | 1857 | CGCCCCACCGUCAAGGUGG | 1006 |
| 1857 | GUAGACUUGACAACAUCCC | 798 | 1857 | GUAGACUUGACAACAUCCC | 798 | 1875 | GGGAUGUUGUCAAGUCUAC | 1007 |
| 1875 | CACAGUGGCACGGAGAGAA | 799 | 1875 | CACAGUGGCACGGAGAGAA | 799 | 1893 | UUCUCUCCGUGCCACUGUG | 1008 |
| 1893 | AGGCCCAUACCUUCUGGUU | 800 | 1893 | AGGCCCAUACCUUCUGGUU | 800 | 1911 | AACCAGAAGGUAUGGGCCU | 1009 |
| 1911 | UGCUUCAGACCUGACACCG | 801 | 1911 | UGCUUCAGACCUGACACCG | 801 | 1929 | CGGUGUCAGGUCUGAAGCA | 1010 |
| 1929 | GUCCCUCAGUGAUACGUAC | 802 | 1929 | GUCCCUCAGUGAUACGUAC | 802 | 1947 | GUACGUAUCACUGAGGGAC | 1011 |
| 1947 | CAGCCAAAAAGGACCAACU | 803 | 1947 | CAGCCAAAAAGGACCAACU | 803 | 1965 | AGUUGGUCCUUUUUGGCUG | 1012 |
| 1965 | UGGCUUCUGUGCACUAGCC | 804 | 1965 | UGGCUUCUGUGCACUAGCC | 804 | 1983 | GGCUAGUGCACAGAAGCCA | 1013 |
| 1983 | CUGUGAUUAACUUGCUUAG | 805 | 1983 | CUGUGAUUAACUUGCUUAG | 805 | 2001 | CUAAGCAAGUUAAUCACAG | 1014 |
| 2001 | GUAUGGUUCUCAGAUCUUG | 806 | 2001 | GUAUGGUUCUCAGAUCUUG | 806 | 2019 | CAAGAUCUGAGAACCAUAC | 1015 |
| 2019 | GACAGUAUAUUUGAAACUG | 807 | 2019 | GACAGUAUAUUUGAAACUG | 807 | 2037 | CAGUUUCAAAUAUACUGUC | 1016 |
| 2037 | GUAAAUAUGUUUGUGCCUU | 808 | 2037 | GUAAAUAUGUUUGUGCCUU | 808 | 2055 | AAGGCACAAACAUAUUUAC | 1017 |
| 2055 | UAAAAGGAGAGAAGAAAGU | 809 | 2055 | UAAAAGGAGAGAAGAAAGU | 809 | 2073 | ACUUUCUUCUCUCCUUUUA | 1018 |
| 2073 | UGUAGAUAGUUAAAAGACU | 810 | 2073 | UGUAGAUAGUUAAAAGACU | 810 | 2091 | AGUCUUUUAACUAUCUACA | 1019 |
| 2091 | UGCAGCUGCUGAAGUUCUG | 811 | 2091 | UGCAGCUGCUGAAGUUCUG | 811 | 2109 | CAGAACUUCAGCAGCUGCA | 1020 |
| 2109 | GAGCCGGGCAAGUCGAGAG | 812 | 2109 | GAGCCGGGCAAGUCGAGAG | 812 | 2127 | CUCUCGACUUGCCCGGCUC | 1021 |
| 2127 | GGGCUGUUGGACAGCUGCU | 813 | 2127 | GGGCUGUUGGACAGCUGCU | 813 | 2145 | AGCAGCUGUCCAACAGCCC | 1022 |
| 2145 | UUGUGGGCCCGGAGUAAUC | 814 | 2145 | UUGUGGGCCCGGAGUAAUC | 814 | 2163 | GAUUACUCCGGGCCCACAA | 1023 |
| 2163 | CAGGCAGCCUUCAUAGGCG | 815 | 2163 | CAGGCAGCCUUCAUAGGCG | 815 | 2181 | CGCCUAUGAAGGCUGCCUG | 1024 |
| 2181 | GGUCAUGUGUGCAUGUGAG | 816 | 2181 | GGUCAUGUGUGCAUGUGAG | 816 | 2199 | CUCACAUGCACACAUGACC | 1025 |
| 2199 | GCACAUGCGUAUAUGUGCG | 817 | 2199 | GCACAUGCGUAUAUGUGCG | 817 | 2217 | CGCACAUAUACGCAUGUGC | 1026 |
| 2217 | GUCUCUCUUUCUCCCUCAC | 818 | 2217 | GUCUCUCUUUCUCCCUCAC | 818 | 2235 | GUGAGGGAGAAAGAGAGAC | 1027 |
| 2235 | CCCCCAGGUGUUGCCAUUU | 819 | 2235 | CCCCCAGGUGUUGCCAUUU | 819 | 2253 | AAAUGGCAACACCUGGGGG | 1028 |
| 2253 | UCUCUGCUUACCCUUCACC | 820 | 2253 | UCUCUGCUUACCCUUCACC | 820 | 2271 | GGUGAAGGGUAAGCAGAGA | 1029 |
| 2271 | CUUUGGUGCAGAGGUUUCU | 821 | 2271 | CUUUGGUGCAGAGGUUUCU | 821 | 2289 | AGAAACCUCUGCACCAAAG | 1030 |
| 2289 | UUGAAUAUCUGCCCCAGUA | 822 | 2289 | UUGAAUAUCUGCCCCAGUA | 822 | 2307 | UACUGGGGCAGAUAUUCAA | 1031 |
| 2307 | AGUCAGAAGCAGGUUCUUG | 823 | 2307 | AGUCAGAAGCAGGUUCUUG | 823 | 2325 | CAAGAACCUGCUUCUGACU | 1032 |
| 2325 | GAUGUCAUGUACUUCCUGU | 824 | 2325 | GAUGUCAUGUACUUCCUGU | 824 | 2343 | ACAGGAAGUACAUGACAUC | 1033 |
| 2343 | UGUACUCUUUAUUUCUAGC | 825 | 2343 | UGUACUCUUUAUUUCUAGC | 825 | 2361 | GCUAGAAAUAAAGAGUACA | 1034 |
| 2361 | CAGAGUGAGGAUGUGUUUU | 826 | 2361 | CAGAGUGAGGAUGUGUUUU | 826 | 2379 | AAAACACAUCCUCACUCUG | 1035 |
| 2379 | UGCACGUCUUGCUAUUUGA | 827 | 2379 | UGCACGUCUUGCUAUUUGA | 827 | 2397 | UCAAAUAGCAAGACGUGCA | 1036 |
| 2397 | AGCAUGCACAGCUGCUUGU | 828 | 2397 | AGCAUGCACAGCUGCUUGU | 828 | 2415 | ACAAGCAGCUGUGCAUGCU | 1037 |
| 2415 | UCCUGCUCUCUUCAGGAGG | 829 | 2415 | UCCUGCUCUCUUCAGGAGG | 829 | 2433 | CCUCCUGAAGAGAGCAGGA | 1038 |
| 2433 | GCCCUGGUGUCAGGCAGGU | 830 | 2433 | GCCCUGGUGUCAGGCAGGU | 830 | 2451 | ACCUGCCUGACACCAGGGC | 1039 |
| 2451 | UUUGCCAGUGAAGACUUCU | 831 | 2451 | UUUGCCAGUGAAGACUUCU | 831 | 2469 | AGAAGUCUUCACUGGCAAA | 1040 |
| 2469 | UUGGGUAGUUUAGAUCCCA | 832 | 2469 | UUGGGUAGUUUAGAUCCCA | 832 | 2487 | UGGGAUCUAAACUACCCAA | 1041 |
| 2487 | AUGUCACCUCAGCUGAUAU | 833 | 2487 | AUGUCACCUCAGCUGAUAU | 833 | 2505 | AUAUCAGCUGAGGUGACAU | 1042 |
| 2505 | UUAUGGCAAGUGAUAUCAC | 834 | 2505 | UUAUGGCAAGUGAUAUCAC | 834 | 2523 | GUGAUAUCACUUGCCAUAA | 1043 |
| 2523 | CCUCUCUUCAGCCCCUAGU | 835 | 2523 | CCUCUCUUCAGCCCCUAGU | 835 | 2541 | ACUAGGGGCUGAAGAGAGG | 1044 |
| 2541 | UGCUAUUCUGUGUUGAACA | 836 | 2541 | UGCUAUUCUGUGUUGAACA | 836 | 2559 | UGUUCAACACAGAAUAGCA | 1045 |
| 2559 | ACAAUUGAUACUUCAGGUG | 837 | 2559 | ACAAUUGAUACUUCAGGUG | 837 | 2577 | CACCUGAAGUAUCAAUUGU | 1046 |
| 2577 | GCUUUUGAUGUGAAAAUCA | 838 | 2577 | GCUUUUGAUGUGAAAAUCA | 838 | 2595 | UGAUUUUCACAUCAAAAGC | 1047 |
| 2595 | AUGAAAAGAGGAACAGGUG | 839 | 2595 | AUGAAAAGAGGAACAGGUG | 839 | 2613 | CACCUGUUCCUCUUUUCAU | 1048 |
| 2613 | GGAUGUAUAGCAUUUUUAU | 840 | 2613 | GGAUGUAUAGCAUUUUUAU | 840 | 2631 | AUAAAAAUGCUAUACAUCC | 1049 |
| 2631 | UUCAUGCCAUCUGUUUUCA | 841 | 2631 | UUCAUGCCAUCUGUUUUCA | 841 | 2649 | UGAAAACAGAUGGCAUGAA | 1050 |
| 2649 | AACCAACUAUUUUUGAGGA | 842 | 2649 | AACCAACUAUUUUUGAGGA | 842 | 2667 | UCCUCAAAAAUAGUUGGUU | 1051 |
| 2667 | AAUUAUCAUGGGAAAAGAC | 843 | 2667 | AAUUAUCAUGGGAAAAGAC | 843 | 2685 | GUCUUUUCCCAUGAUAAUU | 1052 |
| 2685 | CCAGGGCUUUUCCCAGGAA | 844 | 2685 | CCAGGGCUUUUCCCAGGAA | 844 | 2703 | UUCCUGGGAAAAGCCCUGG | 1053 |
| 2703 | AUAUCCCAAACUUCGGAAA | 845 | 2703 | AUAUCCCAAACUUCGGAAA | 845 | 2721 | UUUCCGAAGUUUGGGAUAU | 1054 |
| 2721 | ACAAGUUAUUCUCUUCACU | 846 | 2721 | ACAAGUUAUUCUCUUCACU | 846 | 2739 | AGUGAAGAGAAUAACUUGU | 1055 |
| 2739 | UCCCAAUAACUAAUGCUAA | 847 | 2739 | UCCCAAUAACUAAUGCUAA | 847 | 2757 | UUAGCAUUAGUUAUUGGGA | 1056 |
| 2757 | AGAAAUGCUGAAAAUCAAA | 848 | 2757 | AGAAAUGCUGAAAAUCAAA | 848 | 2775 | UUUGAUUUUCAGCAUUUCU | 1057 |
| 2775 | AGUAAAAAAUUAAAGCCCA | 849 | 2775 | AGUAAAAAAUUAAAGCCCA | 849 | 2793 | UGGGCUUUAAUUUUUUACU | 1058 |
| 2793 | AUAAGGCCAGAAACUCCUU | 850 | 2793 | AUAAGGCCAGAAACUCCUU | 850 | 2811 | AAGGAGUUUCUGGCCUUAU | 1059 |
| 2811 | UUUGCUGUCUUUCUCUAAA | 851 | 2811 | UUUGCUGUCUUUCUCUAAA | 851 | 2829 | UUUAGAGAAAGACAGCAAA | 1060 |
| 2829 | AUAUGAUUACUUUAAAAUA | 852 | 2829 | AUAUGAUUACUUUAAAAUA | 852 | 2847 | UAUUUUAAAGUAAUCAUAU | 1061 |
| 2847 | AAAAAAGUAACAAGGUGUC | 853 | 2847 | AAAAAAGUAACAAGGUGUC | 853 | 2865 | GACACCUUGUUACUUUUUU | 1062 |
| 2865 | CUUUUCCACUCCUAUGGAA | 854 | 2865 | CUUUUCCACUCCUAUGGAA | 854 | 2883 | UUCCAUAGGAGUGGAAAAG | 1063 |
| 2883 | AAAGGGUCUUCUUGGCAGC | 855 | 2883 | AAAGGGUCUUCUUGGCAGC | 855 | 2901 | GCUGCCAAGAAGACCCUUU | 1064 |
| 2901 | CUUAACAUUGACUUCUUGG | 856 | 2901 | CUUAACAUUGACUUCUUGG | 856 | 2919 | CCAAGAAGUCAAUGUUAAG | 1065 |
| 2919 | GUUUGGGGAGAAAUAAAUU | 857 | 2919 | GUUUGGGGAGAAAUAAAUU | 857 | 2937 | AAUUUAUUUCUCCCCAAAC | 1066 |
| 2937 | UUUGUUUCAGAAUUUUGUA | 858 | 2937 | UUUGUUUCAGAAUUUUGUA | 858 | 2955 | UACAAAAUUCUGAAACAAA | 1067 |
| 2955 | AUAUUGUAGGAAUCCCUUU | 859 | 2955 | AUAUUGUAGGAAUCCCUUU | 859 | 2973 | AAAGGGAUUCCUACAAUAU | 1068 |
| 2973 | UGAGAAUGUGAUUCCUUUU | 860 | 2973 | UGAGAAUGUGAUUCCUUUU | 860 | 2991 | AAAAGGAAUCACAUUCUCA | 1069 |
| 2991 | UGAUGGGGAGAAAGGGCAA | 861 | 2991 | UGAUGGGGAGAAAGGGCAA | 861 | 3009 | UUGCCCUUUCUCCCCAUCA | 1070 |
| 3009 | AAUUAUUUUAAUAUUUUGU | 862 | 3009 | AAUUAUUUUAAUAUUUUGU | 862 | 3027 | ACAAAAUAUUAAAAUAAUU | 1071 |
| 3027 | UAUUUUCAACUUUAUAAAG | 863 | 3027 | UAUUUUCAACUUUAUAAAG | 863 | 3045 | CUUUAUAAAGUUGAAAAUA | 1072 |
| 3045 | GAUAAAAUAUCCUCAGGGG | 864 | 3045 | GAUAAAAUAUCCUCAGGGG | 864 | 3063 | CCCCUGAGGAUAUUUUAUC | 1073 |
| 3063 | GUGGAGAAGUGUCGUUUUC | 865 | 3063 | GUGGAGAAGUGUCGUUUUC | 865 | 3081 | GAAAACGACACUUCUCCAC | 1074 |
| 3081 | CAUAACUUGCUGAAUUUCA | 866 | 3081 | CAUAACUUGCUGAAUUUCA | 866 | 3099 | UGAAAUUCAGCAAGUUAUG | 1075 |
| 3099 | AGGCAUUUUGUUCUACAUG | 867 | 3099 | AGGCAUUUUGUUCUACAUG | 867 | 3117 | CAUGUAGAACAAAAUGCCU | 1076 |
| 3117 | GAGGACUCAUAUAUUUAAG | 868 | 3117 | GAGGACUCAUAUAUUUAAG | 868 | 3135 | CUUAAAUAUAUGAGUCCUC | 1077 |
| 3135 | GCCUUUUGUGUAAUAAGAA | 869 | 3135 | GCCUUUUGUGUAAUAAGAA | 869 | 3153 | UUCUUAUUACACAAAAGGC | 1078 |
| 3153 | AAGUAUAAAGUCACUUCCA | 870 | 3153 | AAGUAUAAAGUCACUUCCA | 870 | 3171 | UGGAAGUGACUUUAUACUU | 1079 |
| 3171 | AGUGUUGGCUGUGUGACAG | 871 | 3171 | AGUGUUGGCUGUGUGACAG | 871 | 3189 | CUGUCACACAGCCAACACU | 1080 |
| 3189 | GAAUCUUGUAUUUGGGCCA | 872 | 3189 | GAAUCUUGUAUUUGGGCCA | 872 | 3207 | UGGCCCAAAUACAAGAUUC | 1081 |
| 3207 | AAGGUGUUUCCAUUUCUCA | 873 | 3207 | AAGGUGUUUCCAUUUCUCA | 873 | 3225 | UGAGAAAUGGAAACACCUU | 1082 |
| 3225 | AAUCAGUGCAGUGAUACAU | 874 | 3225 | AAUCAGUGCAGUGAUACAU | 874 | 3243 | AUGUAUCACUGCACUGAUU | 1083 |
| 3243 | UGUACUCCAGAGGGACAGG | 875 | 3243 | UGUACUCCAGAGGGACAGG | 875 | 3261 | CCUGUCCCUCUGGAGUACA | 1084 |
| 3261 | GGUGGACCCCCUGAGUCAA | 876 | 3261 | GGUGGACCCCCUGAGUCAA | 876 | 3279 | UUGACUCAGGGGGUCCACC | 1085 |
| 3279 | ACUGGAGCAAGAAGGAAGG | 877 | 3279 | ACUGGAGCAAGAAGGAAGG | 877 | 3297 | CCUUCCUUCUUGCUCCAGU | 1086 |
| 3297 | GAGGCAGACUGAUGGCGAU | 878 | 3297 | GAGGCAGACUGAUGGCGAU | 878 | 3315 | AUCGCCAUCAGUCUGCCUC | 1087 |
| 3315 | UUCCCUCUCACCCGGGACU | 879 | 3315 | UUCCCUCUCACCCGGGACU | 879 | 3333 | AGUCCCGGGUGAGAGGGAA | 1088 |
| 3333 | UCUCCCCCUUUCAAGGAAA | 880 | 3333 | UCUCCCCCUUUCAAGGAAA | 880 | 3351 | UUUCCUUGAAAGGGGGAGA | 1089 |
| 3351 | AGUGAACCUUUAAAGUAAA | 881 | 3351 | AGUGAACCUUUAAAGUAAA | 881 | 3369 | UUUACUUUAAAGGUUCACU | 1090 |
| 3369 | AGGCCUCAUCUCCUUUAUU | 882 | 3369 | AGGCCUCAUCUCCUUUAUU | 882 | 3387 | AAUAAAGGAGAUGAGGCCU | 1091 |
| 3387 | UGCAGUUCAAAUCCUCACC | 883 | 3387 | UGCAGUUCAAAUCCUCACC | 883 | 3405 | GGUGAGGAUUUGAACUGCA | 1092 |
| 3405 | CAUCCACAGCAAGAUGAAU | 884 | 3405 | CAUCCACAGCAAGAUGAAU | 884 | 3423 | AUUCAUCUUGCUGUGGAUG | 1093 |
| 3423 | UUUUAUCAGCCAUGUUUGG | 885 | 3423 | UUUUAUCAGCCAUGUUUGG | 885 | 3441 | CCAAACAUGGCUGAUAAAA | 1094 |
| 3441 | GUUGUAAAUGCUCGUGUGA | 886 | 3441 | GUUGUAAAUGCUCGUGUGA | 886 | 3459 | UCACACGAGCAUUUACAAC | 1095 |
| 3459 | AUUUCCUACAGAAAUACUG | 887 | 3459 | AUUUCCUACAGAAAUACUG | 887 | 3477 | CAGUAUUUCUGUAGGAAAU | 1096 |
| 3477 | GCUCUGAAUAUUUUGUAAU | 888 | 3477 | GCUCUGAAUAUUUUGUAAU | 888 | 3495 | AUUACAAAAUAUUCAGAGC | 1097 |
| 3495 | UAAAGGUCUUUGCACAUGU | 889 | 3495 | UAAAGGUCUUUGCACAUGU | 889 | 3513 | ACAUGUGCAAAGACCUUUA | 1098 |
| 3513 | UGACCACAUACGUGUUAGG | 890 | 3513 | UGACCACAUACGUGUUAGG | 890 | 3531 | CCUAACACGUAUGUGGUCA | 1099 |
| 3531 | GAGGCUGCAUGCUCUGGAA | 891 | 3531 | GAGGCUGCAUGCUCUGGAA | 891 | 3549 | UUCCAGAGCAUGCAGCCUC | 1100 |
| 3549 | AGCCUGGACUCUAAGCUGG | 892 | 3549 | AGCCUGGACUCUAAGCUGG | 892 | 3567 | CCAGCUUAGAGUCCAGGCU | 1101 |
| 3567 | GAGCUCUUGGAAGAGCUCU | 893 | 3567 | GAGCUCUUGGAAGAGCUCU | 893 | 3585 | AGAGCUCUUCCAAGAGCUC | 1102 |
| 3585 | UUCGGUUUCUGAGCAUAAU | 894 | 3585 | UUCGGUUUCUGAGCAUAAU | 894 | 3603 | AUUAUGCUCAGAAACCGAA | 1103 |
| 3603 | UGCUCCCAUCUCCUGAUUU | 895 | 3603 | UGCUCCCAUCUCCUGAUUU | 895 | 3621 | AAAUCAGGAGAUGGGAGCA | 1104 |
| 3621 | UCUCUGAACAGAAAACAAA | 896 | 3621 | UCUCUGAACAGAAAACAAA | 896 | 3639 | UUUGUUUUCUGUUCAGAGA | 1105 |
| 3639 | AAGAGAGAAUGAGGGAAAU | 897 | 3639 | AAGAGAGAAUGAGGGAAAU | 897 | 3657 | AUUUCCCUCAUUCUCUCUU | 1106 |
| 3657 | UUGCUAUUUUAUUUGUAUU | 898 | 3657 | UUGCUAUUUUAUUUGUAUU | 898 | 3675 | AAUACAAAUAAAAUAGCAA | 1107 |
| 3675 | UCAUGAACUUGGCUGUAAU | 899 | 3675 | UCAUGAACUUGGCUGUAAU | 899 | 3693 | AUUACAGCCAAGUUCAUGA | 1108 |
| 3693 | UCAGUUAUGCCGUAUAGGA | 900 | 3693 | UCAGUUAUGCCGUAUAGGA | 900 | 3711 | UCCUAUACGGCAUAACUGA | 1109 |
| 3711 | AUGUCAGACAAUACCACUG | 901 | 3711 | AUGUCAGACAAUACCACUG | 901 | 3729 | CAGUGGUAUUGUCUGACAU | 1110 |
| 3729 | GGUUAAAAUAAAGCCUAUU | 902 | 3729 | GGUUAAAAUAAAGCCUAUU | 902 | 3747 | AAUAGGCUUUAUUUUAACC | 1111 |
| 3737 | UAAAGCCUAUUUUUCAAAU | 903 | 3737 | UAAAGCCUAUUUUUCAAAU | 903 | 3755 | AUUUGAAAAAUAGGCUUUA | 1112 |

JUN NM_002228

| 3 | AGUUGCACUGAGUGUGGCU | 1113 | 3 | AGUUGCACUGAGUGUGGCU | 1113 | 21 | AGCCACACUCAGUGCAACU | 1294 |
|---|---|---|---|---|---|---|---|---|
| 21 | UGAAGCAGCGAGGCGGGAG | 1114 | 21 | UGAAGCAGCGAGGCGGGAG | 1114 | 39 | CUCCCGCCUCGCUGCUUCA | 1295 |
| 39 | GUGGAGGUGCGCGGAGUCA | 1115 | 39 | GUGGAGGUGCGCGGAGUCA | 1115 | 57 | UGACUCCGCGCACCUCCAC | 1296 |
| 57 | AGGCAGACAGACAGACACA | 1116 | 57 | AGGCAGACAGACAGACACA | 1116 | 75 | UGUGUCUGUCUGUCUGCCU | 1297 |
| 75 | AGCCAGCCAGCCAGGUCGG | 1117 | 75 | AGCCAGCCAGCCAGGUCGG | 1117 | 93 | CCGACCUGGCUGGCUGGCU | 1298 |
| 93 | GCAGUAUAGUCCGAACUGC | 1118 | 93 | GCAGUAUAGUCCGAACUGC | 1118 | 111 | GCAGUUCGGACUAUACUGC | 1299 |
| 111 | CAAAUCUUAUUUUCUUUUC | 1119 | 111 | CAAAUCUUAUUUUCUUUUC | 1119 | 129 | GAAAAGAAAAUAAGAUUUG | 1300 |
| 129 | CACCUUCUCUCUAACUGCC | 1120 | 129 | CACCUUCUCUCUAACUGCC | 1120 | 147 | GGCAGUUAGAGAGAAGGUG | 1301 |
| 147 | CCAGAGCUAGCGCCUGUGG | 1121 | 147 | CCAGAGCUAGCGCCUGUGG | 1121 | 165 | CCACAGGCGCUAGCUCUGG | 1302 |
| 165 | GCUCCCGGGCUGGUGGUUC | 1122 | 165 | GCUCCCGGGCUGGUGGUUC | 1122 | 183 | GAACCACCAGCCCGGGAGC | 1303 |
| 183 | CGGGAGUGUCCAGAGAGCC | 1123 | 183 | CGGGAGUGUCCAGAGAGCC | 1123 | 201 | GGCUCUCUGGACACUCCCG | 1304 |
| 201 | CUUGUCUCCAGCCGGCCCC | 1124 | 201 | CUUGUCUCCAGCCGGCCCC | 1124 | 219 | GGGGCCGGCUGGAGACAAG | 1305 |
| 219 | CGGGAGGAGAGCCCUGCUG | 1125 | 219 | CGGGAGGAGAGCCCUGCUG | 1125 | 237 | CAGCAGGGCUCUCCUCCCG | 1306 |
| 237 | GCCCAGGCGCUGUUGACAG | 1126 | 237 | GCCCAGGCGCUGUUGACAG | 1126 | 255 | CUGUCAACAGCGCCUGGGC | 1307 |
| 255 | GCGGCGGAAAGCAGCGGUA | 1127 | 255 | GCGGCGGAAAGCAGCGGUA | 1127 | 273 | UACCGCUGCUUUCCGCCGC | 1308 |
| 273 | ACCCCACGCGCCCGCCGGG | 1128 | 273 | ACCCCACGCGCCCGCCGGG | 1128 | 291 | CCCGGCGGGCGCGUGGGGU | 1309 |
| 291 | GGGACGUCGGCGAGCGGCU | 1129 | 291 | GGGACGUCGGCGAGCGGCU | 1129 | 309 | AGCCGCUCGCCGACGUCCC | 1310 |
| 309 | UGCAGCAGCAAAGAACUUU | 1130 | 309 | UGCAGCAGCAAAGAACUUU | 1130 | 327 | AAAGUUCUUUGCUGCUGCA | 1311 |
| 327 | UCCCGGCGGGGAGGACCGG | 1131 | 327 | UCCCGGCGGGGAGGACCGG | 1131 | 345 | CCGGUCCUCCCCGCCGGGA | 1312 |
| 345 | GAGACAAGUGGCAGAGUCC | 1132 | 345 | GAGACAAGUGGCAGAGUCC | 1132 | 363 | GGACUCUGCCACUUGUCUC | 1313 |
| 363 | CCGGAGCGAACUUUUGCAA | 1133 | 363 | CCGGAGCGAACUUUUGCXA | 1133 | 381 | UUGCAAAAGUUCGCUCCGG | 1314 |
| 381 | AGCCUUUCCUGCGUCUUAG | 1134 | 381 | AGCCUUUCCUGCGUCUUAG | 1134 | 399 | CUAAGACGCAGGAAAGGCU | 1315 |
| 399 | GGCUUCUCCACGGCGGUAA | 1135 | 399 | GGCUUCUCCACGGCGGUAA | 1135 | 417 | UUACCGCCGUGGAGAAGCC | 1316 |
| 417 | AAGACCAGAAGGCGGCGGA | 1136 | 417 | AAGACCAGAAGGCGGCGGA | 1136 | 435 | UCCGCCGCCUUCUGGUCUU | 1317 |
| 435 | AGAGCCACGCAAGAGAAGA | 1137 | 435 | AGAGCCACGCAAGAGAAGA | 1137 | 453 | UCUUCUCUUGCGUGGCUCU | 1318 |
| 453 | AAGGACGUGCGCUCAGCUU | 1138 | 453 | AAGGACGUGCGCUCAGCUU | 1138 | 471 | AAGCUGAGCGCACGUCCUU | 1319 |
| 471 | UCGCUCGCACCGGUUGUUG | 1139 | 471 | UCGCUCGCACCGGUUGUUG | 1139 | 489 | CAACAACCGGUGCGAGCGA | 1320 |
| 489 | GAACUUGGGCGAGCGCGAG | 1140 | 489 | GAACUUGGGCGAGCGCGAG | 1140 | 507 | CUCGCGCUCGCCCAAGUUC | 1321 |
| 507 | GCCGCGGCUGCCGGGCGCC | 1141 | 507 | GCCGCGGCUGCCGGGCGCC | 1141 | 525 | GGCGCCCGGCAGCCGCGGC | 1322 |
| 525 | CCCCUCCCCCUAGCAGCGG | 1142 | 525 | CCCCUCCCCCUAGCAGCGG | 1142 | 543 | CCGCUGCUAGGGGGAGGGG | 1323 |
| 543 | GAGGAGGGGACAAGUCGUC | 1143 | 543 | GAGGAGGGGACAAGUCGUC | 1143 | 561 | GACGACUUGUCCCCUCCUC | 1324 |
| 561 | CGGAGUCCGGGCGGCCAAG | 1144 | 561 | CGGAGUCCGGGCGGCCAAG | 1144 | 579 | CUUGGCCGCCCGGACUCCG | 1325 |
| 579 | GACCCGCCGCCGGCCGGCC | 1145 | 579 | GACCCGCCGCCGGCCGGCC | 1145 | 597 | GGCCGGCCGGCGGCGGGUC | 1326 |
| 597 | CACUGCAGGGUCCGCACUG | 1146 | 597 | CACUGCAGGGUCCGCACUG | 1146 | 615 | CAGUGCGGACCCUGCAGUG | 1327 |
| 615 | GAUCCGCUCCGCGGGGAGA | 1147 | 615 | GAUCCGCUCCGCGGGGAGA | 1147 | 633 | UCUCCCCGCGGAGCGGAUC | 1328 |
| 633 | AGCCGCUGCUCUGGGAAGU | 1148 | 633 | AGCCGCUGCUCUGGGAAGU | 1148 | 651 | ACUUCCCAGAGCAGCGGCU | 1329 |
| 651 | UGAGUUCGCCUGCGGACUC | 1149 | 651 | UGAGUUCGCCUGCGGACUC | 1149 | 669 | GAGUCCGCAGGCGAACUCA | 1330 |
| 669 | CCGAGGAACCGCUGCGCCC | 1150 | 669 | CCGAGGAACCGCUGCGCCC | 1150 | 687 | GGGCGCAGCGGUUCCUCGG | 1331 |
| 687 | CGAAGAGCGCUCAGUGAGU | 1151 | 687 | CGAAGAGCGCUCAGUGAGU | 1151 | 705 | ACUCACUGAGCGCUCUUCG | 1332 |
| 705 | UGACCGCGACUUUUCAAAG | 1152 | 705 | UGACCGCGACUUUUCAAAG | 1152 | 723 | CUUUGAAAAGUCGCGGUCA | 1333 |
| 723 | GCCGGGUAGCGCGCGCGAG | 1153 | 723 | GCCGGGUAGCGCGCGCGAG | 1153 | 741 | CUCGCGCGCGCUACCCGGC | 1334 |
| 741 | GUCGACAAGUAAGAGUGCG | 1154 | 741 | GUCGACAAGUAAGAGUGCG | 1154 | 759 | CGCACUCUUACUUGUCGAC | 1335 |
| 759 | GGGAGGCAUCUUAAUUAAC | 1155 | 759 | GGGAGGCAUCUUAAUUAAC | 1155 | 777 | GUUAAUUAAGAUGCCUCCC | 1336 |
| 777 | CCCUGCGCUCCCUGGAGCG | 1156 | 777 | CCCUGCGCUCCCUGGAGCG | 1156 | 795 | CGCUCCAGGGAGCGCAGGG | 1337 |
| 795 | GAGCUGGUGAGGAGGGCGC | 1157 | 795 | GAGCUGGUGAGGAGGGCGC | 1157 | 813 | GCGCCCUCCUCACCAGCUC | 1338 |
| 813 | CAGCGGGGACGACAGCCAG | 1158 | 813 | CAGCGGGGACGACAGCCAG | 1158 | 831 | CUGGCUGUCGUCCCCGCUG | 1339 |
| 831 | GCGGGUGCGUGCGCUCUUA | 1159 | 831 | GCGGGUGCGUGCGCUCUUA | 1159 | 849 | UAAGAGCGCACGCACCCGC | 1340 |
| 849 | AGAGAAACUUUCCCUGUCA | 1160 | 849 | AGAGAAACUUUCCCUGUCA | 1160 | 867 | UGACAGGGAAAGUUUCUCU | 1341 |
| 867 | AAAGGCUCCGGGGGGCGCG | 1161 | 867 | AAAGGCUCCGGGGGGCGCG | 1161 | 885 | CGCGCCCCCCGGAGCCUUU | 1342 |
| 885 | GGGUGUCCCCCGCUUGCCA | 1162 | 885 | GGGUGUCCCCCGCUUGCCA | 1162 | 903 | UGGCAAGCGGGGGACACCC | 1343 |
| 903 | AGAGCCCUGUUGCGGCCCC | 1163 | 903 | AGAGCCCUGUUGCGGCCCC | 1163 | 921 | GGGGCCGCAACAGGGCUCU | 1344 |
| 921 | CGAAACUUGUGCGCGCACG | 1164 | 921 | CGAAACUUGUGCGCGCACG | 1164 | 939 | CGUGCGCGCACAAGUUUCG | 1345 |
| 939 | GCCAAACUAACCUCACGUG | 1165 | 939 | GCCAAACUAACCUCACGUG | 1165 | 957 | CACGUGAGGUUAGUUUGGC | 1346 |
| 957 | GAAGUGACGGACUGUUCUA | 1166 | 957 | GAAGUGACGGACUGUUCUA | 1166 | 975 | UAGAACAGUCCGUCACUUC | 1347 |
| 975 | AUGACUGCAAAGAUGGAAA | 1167 | 975 | AUGACUGCAAAGAUGGAAA | 1167 | 993 | UUUCCAUCUUUGCAGUCAU | 1348 |
| 993 | ACGACCUUCUAUGACGAUG | 1168 | 993 | ACGACCUUCUAUGACGAUG | 1168 | 1011 | CAUCGUCAUAGAAGGUCGU | 1349 |
| 1011 | GCCCUCAACGCCUCGUUCC | 1169 | 1011 | GCCCUCAACGCCUCGUUCC | 1169 | 1029 | GGAACGAGGCGUUGAGGGC | 1350 |
| 1029 | CUCCCGUCCGAGAGCGGAC | 1170 | 1029 | CUCCCGUCCGAGAGCGGAC | 1170 | 1047 | GUCCGCUCUCGGACGGGAG | 1351 |
| 1047 | CCUUAUGGCUACAGUAACC | 1171 | 1047 | CCUUAUGGCUACAGUAACC | 1171 | 1065 | GGUUACUGUAGCCAUAAGG | 1352 |
| 1065 | CCCAAGAUCCUGAAACAGA | 1172 | 1065 | CCCAAGAUCCUGAAACAGA | 1172 | 1083 | UCUGUUUCAGGAUCUUGGG | 1353 |
| 1083 | AGCAUGACCCUGAACCUGG | 1173 | 1083 | AGCAUGACCCUGAACCUGG | 1173 | 1101 | CCAGGUUCAGGGUCAUGCU | 1354 |
| 1101 | GCCGACCCAGUGGGGAGCC | 1174 | 1101 | GCCGACCCAGUGGGGAGCC | 1174 | 1119 | GGCUCCCCACUGGGUCGGC | 1355 |
| 1119 | CUGAAGCCGCACCUCCGCG | 1175 | 1119 | CUGAAGCCGCACCUCCGCG | 1175 | 1137 | CGCGGAGGUGCGGCUUCAG | 1356 |
| 1137 | GCCAAGAACUCGGACCUCC | 1176 | 1137 | GCCAAGAACUCGGACCUCC | 1176 | 1155 | GGAGGUCCGAGUUCUUGGC | 1357 |
| 1155 | CUCACCUCGCCCGACGUGG | 1177 | 1155 | CUCACCUCGCCCGACGUGG | 1177 | 1173 | CCACGUCGGGCGAGGUGAG | 1358 |
| 1173 | GGGCUGCUCAAGCUGGCGU | 1178 | 1173 | GGGCUGCUCAAGCUGGCGU | 1178 | 1191 | ACGCCAGCUUGAGCAGCCC | 1359 |
| 1191 | UCGCCCGAGCUGGAGCGCC | 1179 | 1191 | UCGCCCGAGCUGGAGCGCC | 1179 | 1209 | GGCGCUCCAGCUCGGGCGA | 1360 |
| 1209 | CUGAUAAUCCAGUCCAGCA | 1180 | 1209 | CUGAUAAUCCAGUCCAGCA | 1180 | 1227 | UGCUGGACUGGAUUAUCAG | 1361 |
| 1227 | AACGGGCACAUCACCACCA | 1181 | 1227 | AACGGGCACAUCACCACCA | 1181 | 1245 | UGGUGGUGAUGUGCCCGUU | 1362 |
| 1245 | ACGCCGACCCCCACCCAGU | 1182 | 1245 | ACGCCGACCCCCACCCAGU | 1182 | 1263 | ACUGGGUGGGGGUCGGCGU | 1363 |
| 1263 | UUCCUGUGCCCCAAGAACG | 1183 | 1263 | UUCCUGUGCCCCAAGAACG | 1183 | 1281 | CGUUCUUGGGGCACAGGAA | 1364 |
| 1281 | GUGACAGAUGAGCAGGAGG | 1184 | 1281 | GUGACAGAUGAGCAGGAGG | 1184 | 1299 | CCUCCUGCUCAUCUGUCAC | 1365 |
| 1299 | GGGUUCGCCGAGGGCUUCG | 1185 | 1299 | GGGUUCGCCGAGGGCUUCG | 1185 | 1317 | CGAAGCCCUCGGCGAACCC | 1366 |
| 1317 | GUGCGCGCCCUGGCCGAAC | 1186 | 1317 | GUGCGCGCCCUGGCCGAAC | 1186 | 1335 | GUUCGGCCAGGGCGCGCAC | 1367 |
| 1335 | CUGCACAGCCAGAACACGC | 1187 | 1335 | CUGCACAGCCAGAACACGC | 1187 | 1353 | GCGUGUUCUGGCUGUGCAG | 1368 |
| 1353 | CUGCCCAGCGUCACGUCGG | 1188 | 1353 | CUGCCCAGCGUCACGUCGG | 1188 | 1371 | CCGACGUGACGCUGGGCAG | 1369 |
| 1371 | GCGGCGCAGCCGGUCAACG | 1189 | 1371 | GCGGCGCAGCCGGUCAACG | 1189 | 1389 | CGUUGACCGGCUGCGCCGC | 1370 |
| 1389 | GGGGCAGGCAUGGUGGCUC | 1190 | 1389 | GGGGCAGGCAUGGUGGCUC | 1190 | 1407 | GAGCCACCAUGCCUGCCCC | 1371 |
| 1407 | CCCGCGGUAGCCUCGGUGG | 1191 | 1407 | CCCGCGGUAGCCUCGGUGG | 1191 | 1425 | CCACCGAGGCUACCGCGGG | 1372 |
| 1425 | GCAGGGGGCAGCGGCAGCG | 1192 | 1425 | GCAGGGGGCAGCGGCAGCG | 1192 | 1443 | CGCUGCCGCUGCCCCCUGC | 1373 |
| 1443 | GGCGGCUUCAGCGCCAGCC | 1193 | 1443 | GGCGGCUUCAGCGCCAGCC | 1193 | 1461 | GGCUGGCGCUGAAGCCGCC | 1374 |
| 1461 | CUGCACAGCGAGCCGCCGG | 1194 | 1461 | CUGCACAGCGAGCCGCCGG | 1194 | 1479 | CCGGCGGCUCGCUGUGCAG | 1375 |
| 1479 | GUCUACGCAAACCUCAGCA | 1195 | 1479 | GUCUACGCAAACCUCAGCA | 1195 | 1497 | UGCUGAGGUUUGCGUAGAC | 1376 |
| 1497 | AACUUCAACCCAGGCGCGC | 1196 | 1497 | AACUUCAACCCAGGCGCGC | 1196 | 1515 | GCGCGCCUGGGUUGAAGUU | 1377 |
| 1515 | CUGAGCAGCGGCGGCGGGG | 1197 | 1515 | CUGAGCAGCGGCGGCGGGG | 1197 | 1533 | CCCCGCCGCCGCUGCUCAG | 1378 |
| 1533 | GCGCCCUCCUACGGCGCGG | 1198 | 1533 | GCGCCCUCCUACGGCGCGG | 1198 | 1551 | CCGCGCCGUAGGAGGGCGC | 1379 |
| 1551 | GCCGGCCUGGCCUUUCCCG | 1199 | 1551 | GCCGGCCUGGCCUUUCCCG | 1199 | 1569 | CGGGAAAGGCCAGGCCGGC | 1380 |
| 1569 | GCGCAACCCCAGCAGCAGC | 1200 | 1569 | GCGCAACCCCAGCAGCAGC | 1200 | 1587 | GCUGCUGCUGGGGUUGCGC | 1381 |
| 1587 | CAGCAGCCGCCGCACCACC | 1201 | 1587 | CAGCAGCCGCCGCACCACC | 1201 | 1605 | GGUGGUGCGGCGGCUGCUG | 1382 |
| 1605 | CUGCCCCAGCAGAUGCCCG | 1202 | 1605 | CUGCCCCAGCAGAUGCCCG | 1202 | 1623 | CGGGCAUCUGCUGGGGCAG | 1383 |
| 1623 | GUGCAGCACCCGCGGCUGC | 1203 | 1623 | GUGCAGCACCCGCGGCUGC | 1203 | 1641 | GCAGCCGCGGGUGCUGCAC | 1384 |
| 1641 | CAGGCCCUGAAGGAGGAGC | 1204 | 1641 | CAGGCCCUGAAGGAGGAGC | 1204 | 1659 | GCUCCUCCUUCAGGGCCUG | 1385 |
| 1659 | CCUCAGACAGUGCCCGAGA | 1205 | 1659 | CCUCAGACAGUGCCCGAGA | 1205 | 1677 | UCUCGGGCACUGUCUGAGG | 1386 |
| 1677 | AUGCCCGGCGAGACACCGC | 1206 | 1677 | AUGCCCGGCGAGACACCGC | 1206 | 1695 | GCGGUGUCUCGCCGGGCAU | 1387 |
| 1695 | CCCCUGUCCCCCAUCGACA | 1207 | 1695 | CCCCUGUCCCCCAUCGACA | 1207 | 1713 | UGUCGAUGGGGGACAGGGG | 1388 |
| 1713 | AUGGAGUCCCAGGAGCGGA | 1208 | 1713 | AUGGAGUCCCAGGAGCGGA | 1208 | 1731 | UCCGCUCCUGGGACUCCAU | 1389 |
| 1731 | AUCAAGGCGGAGAGGAAGC | 1209 | 1731 | AUCAAGGCGGAGAGGAAGC | 1209 | 1749 | GCUUCCUCUCCGCCUUGAU | 1390 |
| 1749 | CGCAUGAGGAACCGCAUCG | 1210 | 1749 | CGCAUGAGGAACCGCAUCG | 1210 | 1767 | CGAUGCGGUUCCUCAUGCG | 1391 |
| 1767 | GCUGCCUCCAAGUGCCGAA | 1211 | 1767 | GCUGCCUCCAAGUGCCGAA | 1211 | 1785 | UUCGGCACUUGGAGGCAGC | 1392 |
| 1785 | AAAAGGAAGCUGGAGAGAA | 1212 | 1785 | AAAAGGAAGCUGGAGAGAA | 1212 | 1803 | UUCUCUCCAGCUUCCUUUU | 1393 |
| 1803 | AUCGCCCGGCUGGAGGAAA | 1213 | 1803 | AUCGCCCGGCUGGAGGAAA | 1213 | 1821 | UUUCCUCCAGCCGGGCGAU | 1394 |
| 1821 | AAAGUGAAAACCUUGAAAG | 1214 | 1821 | AAAGUGAAAACCUUGAAAG | 1214 | 1839 | CUUUCAAGGUUUUCACUUU | 1395 |
| 1839 | GCUCAGAACUCGGAGCUGG | 1215 | 1839 | GCUCAGAACUCGGAGCUGG | 1215 | 1857 | CCAGCUCCGAGUUCUGAGC | 1396 |
| 1857 | GCGUCCACGGCCAACAUGC | 1216 | 1857 | GCGUCCACGGCCAACAUGC | 1216 | 1875 | GCAUGUUGGCCGUGGACGC | 1397 |
| 1875 | CUCAGGGAACAGGUGGCAC | 1217 | 1875 | CUCAGGGAACAGGUGGCAC | 1217 | 1893 | GUGCCACCUGUUCCCUGAG | 1398 |
| 1893 | CAGCUUAAACAGAAAGUCA | 1218 | 1893 | CAGCUUAAACAGAAAGUCA | 1218 | 1911 | UGACUUUCUGUUUAAGCUG | 1399 |
| 1911 | AUGAACCACGUUAACAGUG | 1219 | 1911 | AUGAACCACGUUAACAGUG | 1219 | 1929 | CACUGUUAACGUGGUUCAU | 1400 |
| 1929 | GGGUGCCAACUCAUGCUAA | 1220 | 1929 | GGGUGCCAACUCAUGCUAA | 1220 | 1947 | UUAGCAUGAGUUGGCACCC | 1401 |
| 1947 | ACGCAGCAGUUGCAAACAU | 1221 | 1947 | ACGCAGCAGUUGCAAACAU | 1221 | 1965 | AUGUUUGCAACUGCUGCGU | 1402 |
| 1965 | UUUUGAAGAGAGACCGUCG | 1222 | 1965 | UUUUGAAGAGAGACCGUCG | 1222 | 1983 | CGACGGUCUCUCUUCAAAA | 1403 |
| 1983 | GGGGGCUGAGGGGCAACGA | 1223 | 1983 | GGGGGCUGAGGGGCAACGA | 1223 | 2001 | UCGUUGCCCCUCAGCCCCC | 1404 |
| 2001 | AAGAAAAAAAAUAACACAG | 1224 | 2001 | AAGAAAAAAAAUAACACAG | 1224 | 2019 | CUGUGUUAUUUUUUUUCUU | 1405 |
| 2019 | GAGAGACAGACUUGAGAAC | 1225 | 2019 | GAGAGACAGACUUGAGAAC | 1225 | 2037 | GUUCUCAAGUCUGUCUCUC | 1406 |
| 2037 | CUUGACAAGUUGCGACGGA | 1226 | 2037 | CUUGACAAGUUGCGACGGA | 1226 | 2055 | UCCGUCGCAACUUGUCAAG | 1407 |
| 2055 | AGAGAAAAAAGAAGUGUCC | 1227 | 2055 | AGAGAAAAAAGAAGUGUCC | 1227 | 2073 | GGACACUUCUUUUUUCUCU | 1408 |
| 2073 | CGAGAACUAAAGCCAAGGG | 1228 | 2073 | CGAGAACUAAAGCCAAGGG | 1228 | 2091 | CCCUUGGCUUUAGUUCUCG | 1409 |
| 2091 | GUAUCCAAGUUGGACUGGG | 1229 | 2091 | GUAUCCAAGUUGGACUGGG | 1229 | 2109 | CCCAGUCCAACUUGGAUAC | 1410 |
| 2109 | GUUCGGUCUGACGGCGCCC | 1230 | 2109 | GUUCGGUCUGACGGCGCCC | 1230 | 2127 | GGGCGCCGUCAGACCGAAC | 1411 |
| 2127 | CCCAGUGUGCACGAGUGGG | 1231 | 2127 | CCCAGUGUGCACGAGUGGG | 1231 | 2145 | CCCACUCGUGCACACUGGG | 1412 |
| 2145 | GAAGGACUUGGUCGCGCCC | 1232 | 2145 | GAAGGACUUGGUCGCGCCC | 1232 | 2163 | GGGCGCGACCAAGUCCUUC | 1413 |
| 2163 | CUCCCUUGGCGUGGAGCCA | 1233 | 2163 | CUCCCUUGGCGUGGAGCCA | 1233 | 2181 | UGGCUCCACGCCAAGGGAG | 1414 |
| 2181 | AGGGAGCGGCCGCCUGCGG | 1234 | 2181 | AGGGAGCGGCCGCCUGCGG | 1234 | 2199 | CCGCAGGCGGCCGCUCCCU | 1415 |
| 2199 | GGCUGCCCCGCUUUGCGGA | 1235 | 2199 | GGCUGCCCCGCUUUGCGGA | 1235 | 2217 | UCCGCAAAGCGGGGCAGCC | 1416 |
| 2217 | ACGGGCUGUCCCCGCGCGA | 1236 | 2217 | ACGGGCUGUCCCCGCGCGA | 1236 | 2235 | UCGCGCGGGGACAGCCCGU | 1417 |
| 2235 | AACGGAACGUUGGACUUUC | 1237 | 2235 | AACGGAACGUUGGACUUUC | 1237 | 2253 | GAAAGUCCAACGUUCCGUU | 1418 |
| 2253 | CGUUAACAUUGACCAAGAA | 1238 | 2253 | CGUUAACAUUGACCAAGAA | 1238 | 2271 | UUCUUGGUCAAUGUUAACG | 1419 |
| 2271 | ACUGCAUGGACCUAACAUU | 1239 | 2271 | ACUGCAUGGACCUAACAUU | 1239 | 2289 | AAUGUUAGGUCCAUGCAGU | 1420 |
| 2289 | UCGAUCUCAUUCAGUAUUA | 1240 | 2289 | UCGAUCUCAUUCAGUAUUA | 1240 | 2307 | UAAUACUGAAUGAGAUCGA | 1421 |
| 2307 | AAAGGGGGGAGGGGGAGGG | 1241 | 2307 | AAAGGGGGGAGGGGGAGGG | 1241 | 2325 | CCCUCCCCCUCCCCCCUUU | 1422 |
| 2325 | GGGUUACAAACUGCAAUAG | 1242 | 2325 | GGGUUACAAACUGCAAUAG | 1242 | 2343 | CUAUUGCAGUUUGUAACCC | 1423 |
| 2343 | GAGACUGUAGAUUGCUUCU | 1243 | 2343 | GAGACUGUAGAUUGCUUCU | 1243 | 2361 | AGAAGCAAUCUACAGUCUC | 1424 |
| 2361 | UGUAGUACUCCUUAAGAAC | 1244 | 2361 | UGUAGUACUCCUUAAGAAC | 1244 | 2379 | GUUCUUAAGGAGUACUACA | 1425 |
| 2379 | CACAAAGCGGGGGGAGGGU | 1245 | 2379 | CACAAAGCGGGGGGAGGGU | 1245 | 2397 | ACCCUCCCCCCGCUUUGUG | 1426 |
| 2397 | UUGGGGAGGGGCGGCAGGA | 1246 | 2397 | UUGGGGAGGGGCGGCAGGA | 1246 | 2415 | UCCUGCCGCCCCUCCCCAA | 1427 |
| 2415 | AGGGAGGUUUGUGAGAGCG | 1247 | 2415 | AGGGAGGUUUGUGAGAGCG | 1247 | 2433 | CGCUCUCACAAACCUCCCU | 1428 |
| 2433 | GAGGCUGAGCCUACAGAUG | 1248 | 2433 | GAGGCUGAGCCUACAGAUG | 1248 | 2451 | CAUCUGUAGGCUCAGCCUC | 1429 |
| 2451 | GAACUCUUUCUGGCCUGCU | 1249 | 2451 | GAACUCUUUCUGGCCUGCU | 1249 | 2469 | AGCAGGCCAGAAAGAGUUC | 1430 |
| 2469 | UUUCGUUAACUGUGUAUGU | 1250 | 2469 | UUUCGUUAACUGUGUAUGU | 1250 | 2487 | ACAUACACAGUUAACGAAA | 1431 |
| 2487 | UACAUAUAUAUAUUUUUUA | 1251 | 2487 | UACAUAUAUAUAUUUUUUA | 1251 | 2505 | UAAAAAAUAUAUAUAUGUA | 1432 |
| 2505 | AAUUUGAUUAAAGCUGAUU | 1252 | 2505 | AAUUUGAUUAAAGCUGAUU | 1252 | 2523 | AAUCAGCUUUAAUCAAAUU | 1433 |
| 2523 | UACUGUCAAUAAACAGCUU | 1253 | 2523 | UACUGUCAAUAAACAGCUU | 1253 | 2541 | AAGCUGUUUAUUGACAGUA | 1434 |
| 2541 | UCAUGCCUUUGUAAGUUAU | 1254 | 2541 | UCAUGCCUUUGUAAGUUAU | 1254 | 2559 | AUAACUUACAAAGGCAUGA | 1435 |
| 2559 | UUUCUUGUUUGUUUGUUUG | 1255 | 2559 | UUUCUUGUUUGUUUGUUUG | 1255 | 2577 | CAAACAAACAAACAAGAAA | 1436 |
| 2577 | GGGUAUCCUGCCCAGUGUU | 1256 | 2577 | GGGUAUCCUGCCCAGUGUU | 1256 | 2595 | AACACUGGGCAGGAUACCC | 1437 |
| 2595 | UGUUUGUAAAUAAGAGAUU | 1257 | 2595 | UGUUUGUAAAUAAGAGAUU | 1257 | 2613 | AAUCUCUUAUUUACAAACA | 1438 |
| 2613 | UUGGAGCACUCUGAGUUUA | 1258 | 2613 | UUGGAGCACUCUGAGUUUA | 1258 | 2631 | UAAACUCAGAGUGCUCCAA | 1439 |
| 2631 | ACCAUUUGUAAUAAAGUAU | 1259 | 2631 | ACCAUUUGUAAUAAAGUAU | 1259 | 2649 | AUACUUUAUUACAAAUGGU | 1440 |
| 2649 | UAUAAUUUUUUUAUGUUUU | 1260 | 2649 | UAUAAUUUUUUUAUGUUUU | 1260 | 2667 | AAAACAUAAAAAAAUUAUA | 1441 |
| 2667 | UGUUUCUGAAAAUUCCAGA | 1261 | 2667 | UGUUUCUGAAAAUUCCAGA | 1261 | 2685 | UCUGGAAUUUUCAGAAACA | 1442 |
| 2685 | AAAGGAUAUUUAAGAAAAU | 1262 | 2685 | AAAGGAUAUUUAAGAAAAU | 1262 | 2703 | AUUUUCUUAAAUAUCCUUU | 1443 |
| 2703 | UACAAUAAACUAUUGGAAA | 1263 | 2703 | UACAAUAAACUAUUGGAAA | 1263 | 2721 | UUUCCAAUAGUUUAUUGUA | 1444 |
| 2721 | AGUACUCCCCUAACCUCUU | 1264 | 2721 | AGUACUCCCCUAACCUCUU | 1264 | 2739 | AAGAGGUUAGGGGAGUACU | 1445 |
| 2739 | UUUCUGCAUCAUCUGUAGA | 1265 | 2739 | UUUCUGCAUCAUCUGUAGA | 1265 | 2757 | UCUACAGAUGAUGCAGAAA | 1446 |
| 2757 | AUCCUAGUCUAUCUAGGUG | 1266 | 2757 | AUCCUAGUCUAUCUAGGUG | 1266 | 2775 | CACCUAGAUAGACUAGGAU | 1447 |
| 2775 | GGAGUUGAAAGAGUUAAGA | 1267 | 2775 | GGAGUUGAAAGAGUUAAGA | 1267 | 2793 | UCUUAACUCUUUCAACUCC | 1448 |
| 2793 | AAUGCUCGAUAAAAUCACU | 1268 | 2793 | AAUGCUCGAUAAAAUCACU | 1268 | 2811 | AGUGAUUUUAUCGAGCAUU | 1449 |
| 2811 | UCUCAGUGCUUCUUACUAU | 1269 | 2811 | UCUCAGUGCUUCUUACUAU | 1269 | 2829 | AUAGUAAGAAGCACUGAGA | 1450 |
| 2829 | UUAAGCAGUAAAAACUGUU | 1270 | 2829 | UUAAGCAGUAAAAACUGUU | 1270 | 2847 | AACAGUUUUUACUGCUUAA | 1451 |
| 2847 | UCUCUAUUAGACUUAGAAA | 1271 | 2847 | UCUCUAUUAGACUUAGAAA | 1271 | 2865 | UUUCUAAGUCUAAUAGAGA | 1452 |
| 2865 | AUAAAUGUACCUGAUGUAC | 1272 | 2865 | AUAAAUGUACCUGAUGUAC | 1272 | 2883 | GUACAUCAGGUACAUUUAU | 1453 |
| 2883 | CCUGAUGCUAUGUCAGGCU | 1273 | 2883 | CCUGAUGCUAUGUCAGGCU | 1273 | 2901 | AGCCUGACAUAGCAUCAGG | 1454 |
| 2901 | UUCAUACUCCACGCUCCCC | 1274 | 2901 | UUCAUACUCCACGCUCCCC | 1274 | 2919 | GGGGAGCGUGGAGUAUGAA | 1455 |
| 2919 | CCAGCGUAUCUAUAUGGAA | 1275 | 2919 | CCAGCGUAUCUAUAUGGAA | 1275 | 2937 | UUCCAUAUAGAUACGCUGG | 1456 |
| 2937 | AUUGCUUACCAAAGGCUAG | 1276 | 2937 | AUUGCUUACCAAAGGCUAG | 1276 | 2955 | CUAGCCUUUGGUAAGCAAU | 1457 |
| 2955 | GUGCGAUGUUUCAGGAGGC | 1277 | 2955 | GUGCGAUGUUUCAGGAGGC | 1277 | 2973 | GCCUCCUGAAACAUCGCAC | 1458 |
| 2973 | CUGGAGGAAGGGGGGUUGC | 1278 | 2973 | CUGGAGGAAGGGGGGUUGC | 1278 | 2991 | GCAACCCCCCUUCCUCCAG | 1459 |
| 2991 | CAGUGGAGAGGGACAGCCC | 1279 | 2991 | CAGUGGAGAGGGACAGCCC | 1279 | 3009 | GGGCUGUCCCUCUCCACUG | 1460 |
| 3009 | CACUGAGAAGUCAAACAUU | 1280 | 3009 | CACUGAGAAGUCAAACAUU | 1280 | 3027 | AAUGUUUGACUUCUCAGUG | 1461 |
| 3027 | UUCAAAGUUUGGAUUGCAU | 1281 | 3027 | UUCAAAGUUUGGAUUGCAU | 1281 | 3045 | AUGCAAUCCAAACUUUGAA | 1462 |
| 3045 | UCAAGUGGCAUGUGCUGUG | 1282 | 3045 | UCAAGUGGCAUGUGCUGUG | 1282 | 3063 | CACAGCACAUGCCACUUGA | 1463 |
| 3063 | GACCAUUUAUAAUGUUAGA | 1283 | 3063 | GACCAUUUAUAAUGUUAGA | 1283 | 3081 | UCUAACAUUAUAAAUGGUC | 1464 |
| 3081 | AAAUUUUACAAUAGGUGCU | 1284 | 3081 | AAAUUUUACAAUAGGUGCU | 1284 | 3099 | AGCACCUAUUGUAAAAUUU | 1465 |
| 3099 | UUAUUCUCAAAGCAGGAAU | 1285 | 3099 | UUAUUCUCAAAGCAGGAAU | 1285 | 3117 | AUUCCUGCUUUGAGAAUAA | 1466 |
| 3117 | UUGGUGGCAGAUUUUACAA | 1286 | 3117 | UUGGUGGCAGAUUUUACAA | 1286 | 3135 | UUGUAAAAUCUGCCACCAA | 1467 |
| 3135 | AAAGAUGUAUCCUUCCAAU | 1287 | 3135 | AAAGAUGUAUCCUUCCAAU | 1287 | 3153 | AUUGGAAGGAUACAUCUUU | 1468 |
| 3153 | UUUGGAAUCUUCUCUUUGA | 1288 | 3153 | UUUGGAAUCUUCUCUUUGA | 1288 | 3171 | UCAAAGAGAAGAUUCCAAA | 1469 |
| 3171 | ACAAUUCCUAGAUAAAAAG | 1289 | 3171 | ACAAUUCCUAGAUAAAAAG | 1289 | 3189 | CUUUUUAUCUAGGAAUUGU | 1470 |
| 3189 | GAUGGCCUUUGUCUUAUGA | 1290 | 3189 | GAUGGCCUUUGUCUUAUGA | 1290 | 3207 | UCAUAAGACAAAGGCCAUC | 1471 |
| 3207 | AAUAUUUAUAACAGCAUUC | 1291 | 3207 | AAUAUUUAUAACAGCAUUC | 1291 | 3225 | GAAUGCUGUUAUAAAUAUU | 1472 |
| 3225 | CUGUCACAAUAAAUGUAUU | 1292 | 3225 | CUGUCACAAUAAAUGUAUU | 1292 | 3243 | AAUACAUUUAUUGUGACAG | 1473 |
| 3234 | UAAAUGUAUUCAAAUACCA | 1293 | 3234 | UAAAUGUAUUCAAAUACCA | 1293 | 3252 | UGGUAUUUGAAUACAUUUA | 1474 |
| The 3′-ends of the Upper sequence and the Lower sequence of the siNA construct can include an overhang sequence, for example about 1, 2, 3, or 4 nucleotides in length, preferably 2 nucleotides in length, wherein the overhanging sequence of the lower sequence is optionally complementary to a portion of the target sequence. The upper sequence is also referred to as the sense | | | | | | | | |
| #strand, whereas the lower sequence is also referred to as the antisense strand. The upper and lower sequences in the Table can further comprise a chemical modification having Formulae I-VII or any combination thereof. | | | | | | | | |

[0447] TABLE III

MAP Kinase Synthetic Modified siNA constructs

| | | | | | | |
|---|---|---|---|---|---|---|
| Target | | Seq | Cmpd | | | Seq |
| Pos | Target | ID | # | Aliases | Sequence | ID |

MAPK1 NM_002745.2

| | | | | | | |
|---|---|---|---|---|---|---|
| 422 | ACCAGACCUACUGCCAGAGAACC | 1475 | | MAPK1: 424U21 sense siNA | CAGACCUACUGCCAGAGAATT | 1535 |
| 586 | UUGAAGACACAACACCUCAGCAA | 1476 | | MAPK1: 588U21 sense siNA | GAAGACACAACACCUCAGCTT | 1536 |
| 776 | AUCACACAGGGUUCCUGACAGAA | 1477 | | MAPK1: 778U21 sense siNA | CACACAGGGUUCCUGACAGTT | 1537 |
| 1716 | UUGGCUCUAGUCACUGGCAUCUC | 1478 | | MAPK1: 1718U21 sense siNA | GGCUCUAGUCACUGGCAUCTT | 1538 |
| 1969 | AUUGGCCCAGCUUUUAGAAAAUG | 1479 | | MAPK1: 1971U21 sense siNA | UGGCCCAGCUUUUAGAAAATT | 1539 |
| 2523 | ACUGUGGAGUUGACUCGGUGUUC | 1480 | | MAPK1: 2525U21 sense siNA | UGUGGAGUUGACUCGGUGUTT | 1540 |
| 2588 | UGUGGUGAGAAAUUUGCCUUGUU | 1481 | | MAPK1: 2590U21 sense siNA | UGGUGAGAAAUUUGCCUUGTT | 1541 |
| 2626 | CCUCGCAUGACUGUUACAGCUUU | 1482 | | MAPK1: 2628U21 sense siNA | UCGCAUGACUGUUACAGCUTT | 1542 |
| 422 | ACCAGACCUACUGCCAGAGAACC | 1475 | | MAPK1: 442L21 antisense siNA | UUCUCUGGCAGUAGGUCUGTT | 1543 |
| | | | | (424C) | | |
| 586 | UUGAAGACACAACACCUCAGCAA | 1476 | | MAPK1: 606L21 antisense siNA | GCUGAGGUGUUGUGUCUUCTT | 1544 |
| | | | | (588C) | | |
| 776 | AUCACACAGGGUUCCUGACAGAA | 1477 | | MAPK1: 796L21 antisense siNA | CUGUCAGGAACCCUGUGUGTT | 1545 |
| | | | | (778C) | | |
| 1716 | UUGGCUCUAGUCACUGGCAUCUC | 1478 | | MAPK1: 1736L21 antisense siNA | GAUGCCAGUGACUAGAGCCTT | 1546 |
| | | | | (1718C) | | |
| 1969 | AUUGGCCCAGCUUUUAGAAAAUG | 1479 | | MAPK1: 1989L21 antisense siNA | UUUUCUAAAAGCUGGGCCATT | 1547 |
| | | | | (1971C) | | |
| 2523 | ACUGUGGAGUUGACUCGGUGUUC | 1480 | | MAPK1: 2543L21 antisense siNA | ACACCGAGUCAACUCCACATT | 1548 |
| | | | | (2525C) | | |
| 2588 | UGUGGUGAGAAAUUUGCCUUGUU | 1481 | | MAPK1: 2608L21 antisense siNA | CAAGGCAAAUUUCUCACCATT | 1549 |
| | | | | (2590C) | | |
| 2626 | CCUCGCAUGACUGUUACAGCUUU | 1482 | | MAPK1: 2646L21 antisense siNA | AGCUGUAACAGUCAUGCGATT | 1550 |
| | | | | (2628C) | | |
| 422 | ACCAGACCUACUGCCAGAGAACC | 1475 | 30817 | MAPK1: 424U21 sense siNA | B cAGAccuAcuGccAGAGAATT B | 1551 |
| | | | | stab04 | | |
| 586 | UUGAAGACACAACACCUCAGCAA | 1476 | | MAPK1: 588U21 sense siNA | B GAAGAcAcAAcAccucAGcTT B | 1552 |
| | | | | stab04 | | |
| 776 | AUCACACAGGGUUCCUGACAGAA | 1477 | 30818 | MAPK1: 778U21 sense siNA | B cAcAcAGGGuuccuGAcAGTT B | 1553 |
| | | | | stab04 | | |
| 1716 | UUGGCUCUAGUCACUGGCAUCUC | 1478 | 30819 | MAPK1: 1718U21 sense siNA | B GGcucuAGucAcuGGcAucTT B | 1554 |
| | | | | stab04 | | |
| 1969 | AUUGGCCCAGCUUUUAGAAAAUG | 1479 | | MAPK1: 1971U21 sense siNA | B uGGccCAGcuuuuAGAAAATT B | 1555 |
| | | | | stab04 | | |
| 2523 | ACUGUGGAGUUGACUCGGUGUUC | 1480 | 30820 | MAPK1: 2525U21 sense siNA | B uGuGGAGuuGAcucGGuGuTT B | 1556 |
| | | | | stab04 | | |
| 2588 | UGUGGUGAGAAAUUUGCCUUGUU | 1481 | | MAPK1: 2590U21 sense siNA | B uGGuGAGAAAuuuGccuuGTT B | 1557 |
| | | | | stab04 | | |
| 2626 | CCUCGCAUGACUGUUACAGCUUU | 1482 | | MAPK1: 2628U21 sense siNA | B ucGcAuGAcuGuuAcAGcuTT B | 1558 |
| | | | | stab04 | | |
| 422 | ACCAGACCUACUGCCAGAGAACC | 1475 | 30821 | MAPK1: 442L21 antisense siNA | uucucuGGcAGuAGGucuGTsT | 1559 |
| | | | | (424C) stab05 | | |
| 586 | UUGAAGACACAACACCUCAGCAA | 1476 | | MAPK1: 606L21 antisense siNA | GcuGAGGuGuuGuGucuucTsT | 1560 |
| | | | | (588C) stab05 | | |
| 776 | AUCACACAGGGUUCCUGACAGAA | 1477 | 30822 | MAPK1: 796L21 antisense siNA | cuGucAGGAAcccuGuGuGTsT | 1561 |
| | | | | (778C) stab05 | | |
| 1716 | UUGGCUCUAGUCACUGGCAUCUC | 1478 | 30823 | MAPK1: 1736L21 antisense siNA | GAuGccAGuGAcuAGAGccTsT | 1562 |
| | | | | (1718C) stab05 | | |
| 1969 | AUUGGCCCAGCUUUUAGAAAAUG | 1479 | | MAPK1: 1989L21 antisense siNA | uuuucuAAAAGcuGGGccATsT | 1563 |
| | | | | (1971C) stab05 | | |
| 2523 | ACUGUGGAGUUGACUCGGUGUUC | 1480 | 30824 | MAPK1: 2543L21 antisense siNA | AcAccGAGucAAcuccAcATsT | 1564 |
| | | | | (2525C) stab05 | | |
| 2588 | UGUGGUGAGAAAUUUGCCUUGUU | 1481 | | MAPK1: 2608L21 antisense siNA | cAAGGcAAAuuucucAccATsT | 1565 |
| | | | | (2590C) stab05 | | |
| 2626 | CCUCGCAUGACUGUUACAGCUUU | 1482 | | MAPK1: 2646L21 antisense siNA | AGcuGuAAcAGucAuGcGATsT | 1566 |
| | | | | (2628C) stab05 | | |
| 422 | ACCAGACCUACUGCCAGAGAACC | 1475 | | MAPK1: 424U21 sense siNA | B cAGAccuAcuGccAGAGAATT B | 1567 |
| | | | | stab07 | | |
| 586 | UUGAAGACACAACACCUCAGCAA | 1476 | | MAPK1: 588U21 sense siNA | B GAAGAcAcAAcAccucAGcTT B | 1568 |
| | | | | stab07 | | |
| 776 | AUCACACAGGGUUCCUGACAGAA | 1477 | | MAPK1: 778U21 sense siNA | B cAcAcAGGGuuccuGAcAGTT B | 1569 |
| | | | | stab07 | | |
| 1716 | UUGGCUCUAGUCACUGGCAUCUC | 1478 | | MAPK1: 1718U21 sense siNA | B GGcucuAGucAcuGGcAucTT B | 1570 |
| | | | | stab07 | | |
| 1969 | AUUGGCCCAGCUUUUAGAAAAUG | 1479 | | MAPK1: 1971U21 sense siNA | B uGGcccAGcuuuuAGAAAATT B | 1571 |
| | | | | stab07 | | |
| 2523 | ACUGUGGAGUUGACUCGGUGUUC | 1480 | | MAPK1: 2525U21 sense siNA | B uGuGGAGuuGAcucGGuGuTT B | 1572 |
| | | | | stab07 | | |
| 2588 | UGUGGUGAGAAAUUUGCCUUGUU | 1481 | | MAPK1: 2590U21 sense siNA | B uGGuGAGAAAuuuGccuuGTT B | 1573 |
| | | | | stab07 | | |
| 2626 | CCUCGCAUGACUGUUACAGCUUU | 1482 | | MAPK1: 2628U21 sense siNA | B ucGcAuGAcuGuuAcAGcuTT B | 1574 |
| | | | | stab07 | | |
| 422 | ACCAGACCUACUGCCAGAGAACC | 1475 | | MAPK1: 442L21 antisense siNA | uucucuGGcAGuAGGucuGTsT | 1575 |
| | | | | (424C) stab11 | | |
| 586 | UUGAAGACACAACACCUCAGCAA | 1476 | | MAPK1: 606L21 antisense siNA | GcuGAGGuGuuGuGucuucTsT | 1576 |
| | | | | (588C) stab11 | | |
| 776 | AUCACACAGGGUUCCUGACAGAA | 1477 | | MAPK1: 796L21 antisense siNA | cuGucAGGAAcccuGuGuGTsT | 1577 |
| | | | | (778C) stab11 | | |
| 1716 | UUGGCUCUAGUCACUGGCAUCUC | 1478 | | MAPK1: 1736L21 antisense siNA | GAuGccAGuGAcuAGAGccTsT | 1578 |
| | | | | (1718C) stab11 | | |
| 1969 | AUUGGCCCAGCUUUUAGAAAAUG | 1479 | | MAPK1: 1989L21 antisense siNA | uuuucuAAAAGcuGGGccATsT | 1579 |
| | | | | (1971C) stab11 | | |
| 2523 | ACUGUGGAGUUGACUCGGUGUUC | 1480 | | MAPK1: 2543L21 antisense siNA | AcAccGAGucAAcuccAcATsT | 1580 |
| | | | | (2525C) stab11 | | |
| 2588 | UGUGGUGAGAAAUUUGCCUUGUU | 1481 | | MAPK1: 2608L21 antisense siNA | cAAGGcAAAuuucucAccATsT | 1581 |
| | | | | (2590C) stab11 | | |
| 2626 | CCUCGCAUGACUGUUACAGCUUU | 1482 | | MAPK1: 2646L21 antisense siNA | AGcuGuAAcAGucAuGcGATsT | 1582 |
| | | | | (2628C) stab11 | | |
| 422 | ACCAGACCUACUGCCAGAGAACC | 1475 | | MAPK1: 424U21 sense siNA | B cAGAccuAcuGccAGAGAATT B | 1583 |
| | | | | stab18 | | |
| 586 | UUGAAGACACAACACCUCAGCAA | 1476 | | MAPK1: 588U21 sense siNA | B GAAGAcAcAAcAccucAGcTT B | 1584 |
| | | | | stab18 | | |
| 776 | AUCACACAGGGUUCCUGACAGAA | 1477 | | MAPK1: 778U21 sense siNA | B cAcAcAGGGuuccuGAcAGTT B | 1585 |
| | | | | stab18 | | |
| 1716 | UUGGCUCUAGUCACUGGCAUCUC | 1478 | | MAPK1: 1718U21 sense siNA | B GGcucuAGucAcuGGcAucTT B | 1586 |
| | | | | stab18 | | |
| 1969 | AUUGGCCCAGCUUUUAGAAAAUG | 1479 | | MAPK1: 1971U21 sense siNA | B uGGcccAGcuuuuAGAAAATT B | 1587 |
| | | | | stab18 | | |
| 2523 | ACUGUGGAGUUGACUCGGUGUUC | 1480 | | MAPK1: 2525U21 sense siNA | B uGuGGAGuuGAcucGGuGuTT B | 1588 |
| | | | | stab18 | | |
| 2588 | UGUGGUGAGAAAUUUGCCUUGUU | 1481 | | MAPK1: 2590U21 sense siNA | B uGGuGAGAAAuuuGccuuGTT B | 1589 |
| | | | | stab18 | | |
| 2626 | CCUCGCAUGACUGUUACAGCUUU | 1482 | | MAPK1: 2628U21 sense siNA | B ucGcAuGAcuGuuAcAGcuTT B | 1590 |
| | | | | stab18 | | |
| 422 | ACCAGACCUACUGCCAGAGAACC | 1475 | | MAPK1: 442L21 antisense siNA | uucucuGGcAGuAGGucuGTsT | 1591 |
| | | | | (424C) stab08 | | |
| 586 | UUGAAGACACAACACCUCAGCAA | 1476 | | MAPK1: 606L21 antisense siNA | GcuGAGGuGuuGuGucuucTsT | 1592 |
| | | | | (588C) stab08 | | |
| 776 | AUCACACAGGGUUCCUGACAGAA | 1477 | | MAPK1: 796L21 antisense siNA | cuGucAGGAAcccuGuGuGTsT | 1593 |
| | | | | (778C) stab08 | | |
| 1716 | UUGGCUCUAGUCACUGGCAUCUC | 1478 | | MAPK1: 1736L21 antisense siNA | GAuGccAGuGAcuAGAGccTsT | 1594 |
| | | | | (1718C) stab08 | | |
| 1969 | AUUGGCCCAGCUUUUAGAAAAUG | 1479 | | MAPK1: 1989L21 antisense siNA | uuuucuAAAAGcuGGGccATsT | 1595 |
| | | | | (1971C) stab08 | | |
| 2523 | ACUGUGGAGUUGACUCGGUGUUC | 1480 | | MAPK1: 2543L21 antisense siNA | AcAccGAGucAAcuccAcATsT | 1596 |
| | | | | (2525C) stab08 | | |
| 2588 | UGUGGUGAGAAAUUUGCCUUGUU | 1481 | | MAPK1: 2608L21 antisense siNA | cAAGGcAAAuuucucAccATsT | 1597 |
| | | | | (2590C) stab08 | | |
| 2626 | CCUCGCAUGACUGUUACAGCUUU | 1482 | | MAPK1: 2646L21 antisense siNA | AGcuGuAAcAGucAuGcGATsT | 1598 |
| | | | | (2628C) stab08 | | |
| 422 | ACCAGACCUACUGCCAGAGAACC | 1475 | | MAPK1: 424U21 sense siNA | B CAGACCUACUGCCAGAGAATT B | 1599 |
| | | | | stab09 | | |
| 586 | UUGAAGACACAACACCUCAGCAA | 1476 | | MAPK1: 588U21 sense siNA | B GAAGACACAACACCUCAGCTT B | 1600 |
| | | | | stab09 | | |
| 776 | AUCACACAGGGUUCCUGACAGAA | 1477 | | MAPK1: 778U21 sense siNA | B CACACAGGGUUCCUGACAGTT B | 1601 |
| | | | | stab09 | | |
| 1716 | UUGGCUCUAGUCACUGGCAUCUC | 1478 | | MAPK1: 1718U21 sense siNA | B GGCUCUAGUCACUGGCAUCTT B | 1602 |
| | | | | stab09 | | |
| 1969 | AUUGGCCCAGCUUUUAGAAAAUG | 1479 | | MAPK1: 1971U21 sense siNA | B UGGCCCAGCUUUUAGAAAATT B | 1603 |
| | | | | stab09 | | |
| 2523 | ACUGUGGAGUUGACUCGGUGUUC | 1480 | | MAPK1: 2525U21 sense siNA | B UGUGGAGUUGACUCGGUGUTT B | 1604 |
| | | | | stab09 | | |
| 2588 | UGUGGUGAGAAAUUUGCCUUGUU | 1481 | | MAPK1: 2590U21 sense siNA | B UGGUGAGAAAUUUGCCUUGTT B | 1605 |
| | | | | stab09 | | |
| 2626 | CCUCGCAUGACUGUUACAGCUUU | 1482 | | MAPK1: 2628U21 sense siNA | B UCGCAUGACUGUUACAGCUTT B | 1606 |
| | | | | stab09 | | |
| 422 | ACCAGACCUACUGCCAGAGAACC | 1475 | | MAPK1: 442L21 antisense siNA | UUCUCUGGCAGUAGGUCUGTsT | 1607 |
| | | | | (424C) stab10 | | |
| 586 | UUGAAGACACAACACCUCAGCAA | 1476 | | MAPK1: 606L21 antisense siNA | GCUGAGGUGUUGUGUCUUCTsT | 1608 |
| | | | | (588C) stab10 | | |
| 776 | AUCACACAGGGUUCCUGACAGAA | 1477 | | MAPK1: 796L21 antisense siNA | CUGUCAGGAACCCUGUGUGTsT | 1609 |
| | | | | (778C) stab10 | | |
| 1716 | UUGGCUCUAGUCACUGGCAUCUC | 1478 | | MAPK1: 1736L21 antisense siNA | GAUGCCAGUGACUAGAGCCTsT | 1610 |
| | | | | (1718C) stab10 | | |
| 1969 | AUUGGCCCAGCUUUUAGAAAAUG | 1479 | | MAPK1: 1989L21 antisense siNA | UUUUCUAAAAGCUGGGCCATsT | 1611 |
| | | | | (1971C) stab10 | | |
| 2523 | ACUGUGGAGUUGACUCGGUGUUC | 1480 | | MAPK1: 2543L21 antisense siNA | ACACCGAGUCAACUCCACATsT | 1612 |
| | | | | (2525C) stab10 | | |
| 2588 | UGUGGUGAGAAAUUUGCCUUGUU | 1481 | | MAPK1: 2608L21 antisense siNA | CAAGGCAAAUUUCUCACCATsT | 1613 |
| | | | | (2590C) stab10 | | |
| 2626 | CCUCGCAUGACUGUUACAGCUUU | 1482 | | MAPK1: 2646L21 antisense siNA | AGCUGUAACAGUCAUGCGATsT | 1614 |
| | | | | (2628C) stab10 | | |
| 422 | ACCAGACCUACUGCCAGAGAACC | 1475 | | MAPK1: 442L21 antisense siNA | uucucuGGcAGuAGGucuGTT B | 1615 |
| | | | | (424C) stab19 | | |
| 586 | UUGAAGACACAACACCUCAGCAA | 1476 | | MAPK1: 606L21 antisense siNA | GcuGAGGuGuuGuGucuucTT B | 1616 |
| | | | | (588C) stab19 | | |
| 776 | AUCACACAGGGUUCCUGACAGAA | 1477 | | MAPK1: 796L21 antisense siNA | cuGucAGGAAcccuGuGuGTT B | 1617 |
| | | | | (778C) stab19 | | |
| 1716 | UUGGCUCUAGUCACUGGCAUCUC | 1478 | | MAPK1: 1736L21 antisense siNA | GAuGccAGuGAcuAGAGccTT B | 1618 |
| | | | | (1718C) stab19 | | |
| 1969 | AUUGGCCCAGCUUUUAGAAAAUG | 1479 | | MAPK1: 1989L21 antisense siNA | uuuucuAAAAGcuGGGccATT B | 1619 |
| | | | | (1971C) stab19 | | |
| 2523 | ACUGUGGAGUUGACUCGGUGUUC | 1480 | | MAPK1: 2543L21 antisense siNA | AcAccGAGucAAcuccAcATT B | 1620 |
| | | | | (2525C) stab19 | | |
| 2588 | UGUGGUGAGAAAUUUGCCUUGUU | 1481 | | MAPK1: 2608L21 antisense siNA | cAAGGcAAAuuucucAccATT B | 1621 |
| | | | | (2590C) stab19 | | |
| 2626 | CCUCGCAUGACUGUUACAGCUUU | 1482 | | MAPK1: 2646L21 antisense siNA | AGcuGuAAcAGucAuGcGATT B | 1622 |
| | | | | (2628C) stab19 | | |
| 422 | ACCAGACCUACUGCCAGAGAACC | 1475 | | MAPK1: 442L21 antisense siNA | UUCUCUGGCAGUAGGUCUGTT B | 1623 |
| | | | | (424C) stab22 | | |
| 586 | UUGAAGACACAACACCUCAGCAA | 1476 | | MAPK1: 606L21 antisense siNA | GCUGAGGUGUUGUGUCUUCTT B | 1624 |
| | | | | (588C) stab22 | | |
| 776 | AUCACACAGGGUUCCUGACAGAA | 1477 | | MAPK1: 796L21 antisense siNA | CUGUCAGGAACCCUGUGUGTT B | 1625 |
| | | | | (778C) stab22 | | |
| 1716 | UUGGCUCUAGUCACUGGCAUCUC | 1478 | | MAPK1: 1736L21 antisense siNA | GAUGCCAGUGACUAGAGCCTT B | 1626 |
| | | | | (1718C) stab22 | | |
| 1969 | AUUGGCCCAGCUUUUAGAAAAUG | 1479 | | MAPK1: 1989L21 antisense siNA | UUUUCUAAAAGCUGGGCCATT B | 1627 |
| | | | | (1971C) stab22 | | |
| 2523 | ACUGUGGAGUUGACUCGGUGUUC | 1480 | | MAPK1: 2543L21 antisense siNA | ACACCGAGUCAACUCCACATT B | 1628 |
| | | | | (2525C) stab22 | | |
| 2588 | UGUGGUGAGAAAUUUGCCUUGUU | 1481 | | MAPK1: 2608L21 antisense siNA | AAGGCAAAUUUCUCACCATT B | 1629 |
| | | | | (2590C) stab22 | | |
| 2626 | CCUCGCAUGACUGUUACAGCUUU | 1482 | | MAPK1: 2646L21 antisense siNA | AGCUGUAACAGUCAUGCGATT B | 1630 |
| | | | | (2628C) stab22 | | |

MAPK3

| | | | | | | |
|---|---|---|---|---|---|---|
| 283 | CCUUCGAACAUCAGACCUACUGC | 1483 | | MAPK3: 285U21 sense siNA | UUCGAACAUCAGACCUACUTT | 1631 |
| 709 | UGAACUCCAAGGGCUAUACCAAG | 1484 | | MAPK3: 711U21 sense siNA | AACUCCAAGGGCUAUACCATT | 1632 |
| 716 | CAAGGGCUAUACCAAGUCCAUCG | 1485 | | MAPK3: 718U21 sense siNA | AGGGCUAUACCAAGUCCAUTT | 1633 |
| 718 | AGGGCUAUACCAAGUCCAUCGAC | 1486 | | MAPK3: 720U21 sense siNA | GGCUAUACCAAGUCCAUCGTT | 1634 |
| 1045 | ACCUGGAGCAGUACUAUGACCCG | 1487 | | MAPK3: 1047U21 sense siNA | CUGGAGCAGUACUAUGACCTT | 1635 |
| 1305 | CUCCCGCCAGACUGUUAGAAAAU | 1488 | | MAPK3: 1307U21 sense siNA | CCCGCCAGACUGUUAGAAATT | 1636 |
| 1778 | UUCUGUGUGUGGUGAGCAGAAGU | 1489 | | MAPK3: 1780U21 sense siNA | CUGUGUGUGGUGAGCAGAATT | 1637 |
| 1782 | GUGUGUGGUGAGCAGAAGUGGAG | 1490 | | MAPK3: 1784U21 sense siNA | GUGUGGUGAGCAGAAGUGGTT | 1638 |
| 283 | CCUUCGAACAUCAGACCUACUGC | 1483 | | MAPK3: 303L21 antisense siNA | AGUAGGUCUGAUGUUCGAATT | 1639 |
| | | | | (285C) | | |
| 709 | UGAACUCCAAGGGCUAUACCAAG | 1484 | | MAPK3: 729L21 antisense siNA | UGGUAUAGCCCUUGGAGUUTT | 1640 |
| | | | | (711C) | | |
| 716 | CAAGGGCUAUACCAAGUCCAUCG | 1485 | | MAPK3: 736L21 antisense siNA | AUGGACUUGGUAUAGCCCUTT | 1641 |
| | | | | (718C) | | |
| 718 | AGGGCUAUACCAAGUCCAUCGAC | 1486 | | MAPK3: 738L21 antisense siNA | CGAUGGACUUGGUAUAGCCTT | 1642 |
| | | | | (720C) | | |
| 1045 | ACCUGGAGCAGUACUAUGACCCG | 1487 | | MAPK3: 1065L21 antisense siNA | GGUCAUAGUACUGCUCCAGTT | 1643 |
| | | | | (1047C) | | |
| 1305 | CUCCCGCCAGACUGUUAGAAAAU | 1488 | | MAPK3: 1325L21 antisense siNA | UUUCUAACAGUCUGGCGGGTT | 1644 |
| | | | | (1307C) | | |
| 1778 | UUCUGUGUGUGGUGAGCAGAAGU | 1489 | | MAPK3: 1798L21 antisense siNA | UUCUGCUCACCACACACAGTT | 1645 |
| | | | | (1780C) | | |
| 1782 | GUGUGUGGUGAGCAGAAGUGGAG | 1490 | | MAPK3: 1802L21 antisense siNA | CCACUUCUGCUCACCACACTT | 1646 |
| | | | | (1784C) | | |
| 283 | CCUUCGAACAUCAGACCUACUGC | 1483 | | MAPK3: 285U21 sense siNA | B uucGAAcAucAGAccuAcuTT B | 1647 |
| | | | | stab04 | | |
| 709 | UGAACUCCAAGGGCUAUACCAAG | 1484 | | MAPK3: 711U21 sense siNA | B AAcuccAAGGGcuAuAccATT B | 1648 |
| | | | | stab04 | | |
| 716 | CAAGGGCUAUACCAAGUCCAUCG | 1485 | | MAPK3: 718U21 sense siNA | B AGGGcuAuAccAAGuccAuTT B | 1649 |
| | | | | stab04 | | |
| 718 | AGGGCUAUACCAAGUCCAUCGAC | 1486 | | MAPK3: 720U21 sense siNA | B GGcuAuAccAAGuccAucGTT B | 1650 |
| | | | | stab04 | | |
| 1045 | ACCUGGAGCAGUACUAUGACCCG | 1487 | | MAPK3: 1047U21 sense siNA | B cuGGAGcAGuAcuAuGAccTT B | 1651 |
| | | | | stab04 | | |
| 1305 | CUCCCGCCAGACUGUUAGAAAAU | 1488 | | MAPK3: 1307U21 sense siNA | B cccGccAGAcuGuuAGAAATT B | 1652 |
| | | | | stab04 | | |
| 1778 | UUCUGUGUGUGGUGAGCAGAAGU | 1489 | | MAPK3: 1780U21 sense siNA | B cuGuGuGuGGuGAGcAGAATT B | 1653 |
| | | | | stab04 | | |
| 1782 | GUGUGUGGUGAGCAGAAGUGGAG | 1490 | | MAPK3: 1784U21 sense siNA | B GuGuGGuGAGcAGAAGuGGTT B | 1654 |
| | | | | stab04 | | |
| 283 | CCUUCGAACAUCAGACCUACUGC | 1483 | | MAPK3: 303L21 antisense siNA | AGuAGGucuGAuGuucGAATsT | 1655 |
| | | | | (285C) stab05 | | |
| 709 | UGAACUCCAAGGGCUAUACCAAG | 1484 | | MAPK3: 729L21 antisense siNA | uGGuAuAGcccuuGGAGuuTsT | 1656 |
| | | | | (711C) stab05 | | |
| 716 | CAAGGGCUAUACCAAGUCCAUCG | 1485 | | MAPK3: 736L21 antisense siNA | AuGGAcuuGGuAuAGcccuTsT | 1657 |
| | | | | (718C) stab05 | | |
| 718 | AGGGCUAUACCAAGUCCAUCGAC | 1486 | | MAPK3: 738L21 antisense siNA | cGAuGGAcuuGGuAuAGccTsT | 1658 |
| | | | | (720C) stab05 | | |
| 1045 | ACCUGGAGCAGUACUAUGACCCG | 1487 | | MAPK3: 1065L21 antisense siNA | GGucAuAGuAcuGcuccAGTsT | 1659 |
| | | | | (1047C) stab05 | | |
| 1305 | CUCCCGCCAGACUGUUAGAAAAU | 1488 | | MAPK3: 1325L21 antisense siNA | uuucuAAcAGucuGGcGGGTsT | 1660 |
| | | | | (1307C) stab05 | | |
| 1778 | UUCUGUGUGUGGUGAGCAGAAGU | 1489 | | MAPK3: 1798L21 antisense siNA | uucuGcucAccAcAcAcAGTsT | 1661 |
| | | | | (1780C) stab05 | | |
| 1782 | GUGUGUGGUGAGCAGAAGUGGAG | 1490 | | MAPK3: 1802L21 antisense siNA | ccAcuucuGcucAccAcAcTsT | 1662 |
| | | | | (1784C) stab05 | | |
| 283 | CCUUCGAACAUCAGACCUACUGC | 1483 | | MAPK3: 285U21 sense siNA | B uucGAAcAucAGAccuAcuTT B | 1663 |
| | | | | stab07 | | |
| 709 | UGAACUCCAAGGGCUAUACCAAG | 1484 | | MAPK3: 711U21 sense siNA | B AAcuccAAGGGcuAuAccATT B | 1664 |
| | | | | stab07 | | |
| 716 | CAAGGGCUAUACCAAGUCCAUCG | 1485 | | MAPK3: 718U21 sense siNA | B AGGGcuAuAccAAGuccAuTT B | 1665 |
| | | | | stab07 | | |
| 718 | AGGGCUAUACCAAGUCCAUCGAC | 1486 | | MAPK3: 720U21 sense siNA | B GGcuAuAccAAGuccAucGTT B | 1666 |
| | | | | stab07 | | |
| 1045 | ACCUGGAGCAGUACUAUGACCCG | 1487 | | MAPK3: 1047U21 sense siNA | B cuGGAGcAGuAcuAuGAccTT B | 1667 |
| | | | | stab07 | | |
| 1305 | CUCCCGCCAGACUGUUAGAAAAU | 1488 | | MAPK3: 1307U21 sense siNA | B cccGccAGAcuGuuAGAAATT B | 1668 |
| | | | | stab07 | | |
| 1778 | UUCUGUGUGUGGUGAGCAGAAGU | 1489 | | MAPK3: 1780U21 sense siNA | B cuGuGuGuGGuGAGcAGAATT B | 1669 |
| | | | | stab07 | | |
| 1782 | GUGUGUGGUGAGCAGAAGUGGAG | 1490 | | MAPK3: 1784U21 sense siNA | B GuGuGGuGAGcAGAAGuGGTT B | 1670 |
| | | | | stab07 | | |
| 283 | CCUUCGAACAUCAGACCUACUGC | 1483 | | MAPK3: 303L21 antisense siNA | AGuAGGucuGAuGuucGAATsT | 1671 |
| | | | | (285C) stab11 | | |
| 709 | UGAACUCCAAGGGCUAUACCAAG | 1484 | | MAPK3: 729L21 antisense siNA | uGGuAuAGcccuuGGAGuuTsT | 1672 |
| | | | | (711C) stab11 | | |
| 716 | CAAGGGCUAUACCAAGUCCAUCG | 1485 | | MAPK3: 736L21 antisense siNA | AuGGAcuuGGuAuAGcccuTsT | 1673 |
| | | | | (718C) stab11 | | |
| 718 | AGGGCUAUACCAAGUCCAUCGAC | 1486 | | MAPK3: 738L21 antisense siNA | cGAuGGAcuuGGuAuAGccTsT | 1674 |
| | | | | (720C) stab11 | | |
| 1045 | ACCUGGAGCAGUACUAUGACCCG | 1487 | | MAPK3: 1065L21 antisense siNA | GGucAuAGuAcuGcuccAGTsT | 1675 |
| | | | | (1047C) stab11 | | |
| 1305 | CUCCCGCCAGACUGUUAGAAAAU | 1488 | | MAPK3: 1325L21 antisense siNA | uuucuAAcAGucuGGcGGGTsT | 1676 |
| | | | | (1307C) stab11 | | |
| 1778 | UUCUGUGUGUGGUGAGCAGAAGU | 1489 | | MAPK3: 1798L21 antisense siNA | uucuGcucAccAcAcAcAGTsT | 1677 |
| | | | | (1780C) stab11 | | |
| 1782 | GUGUGUGGUGAGCAGAAGUGGAG | 1490 | | MAPK3: 1802L21 antisense siNA | ccAcuucuGcucAccAcAcTsT | 1678 |
| | | | | (1784C) stab11 | | |
| 283 | CCUUCGAACAUCAGACCUACUGC | 1483 | | MAPK3: 285U21 sense siNA | B uucGAAcAucAGAccuAcuTT B | 1679 |
| | | | | stab18 | | |
| 709 | UGAACUCCAAGGGCUAUACCAAG | 1484 | | MAPK3: 711U21 sense siNA | B AAcuccAAGGGcuAuAccATT B | 1680 |
| | | | | stab18 | | |
| 716 | CAAGGGCUAUACCAAGUCCAUCG | 1485 | | MAPK3: 718U21 sense siNA | B AGGGcuAuAccAAGuccAuTT B | 1681 |
| | | | | stab18 | | |
| 718 | AGGGCUAUACCAAGUCCAUCGAC | 1486 | | MAPK3: 720U21 sense siNA | B GGcuAuAccAAGuccAucGTT B | 1682 |
| | | | | stab18 | | |
| 1045 | ACCUGGAGCAGUACUAUGACCCG | 1487 | | MAPK3: 1047U21 sense siNA | B cuGGAGcAGuAcuAuGAccTT B | 1683 |
| | | | | stab18 | | |
| 1305 | CUCCCGCCAGACUGUUAGAAAAU | 1488 | | MAPK3: 1307U21 sense siNA | B cccGccAGAcuGuuAGAAATT B | 1684 |
| | | | | stab18 | | |
| 1778 | UUCUGUGUGUGGUGAGCAGAAGU | 1489 | | MAPK3: 1780U21 sense siNA | B cuGuGuGuGGuGAGcAGAATT B | 1685 |
| | | | | stab18 | | |
| 1782 | GUGUGUGGUGAGCAGAAGUGGAG | 1490 | | MAPK3: 1784U21 sense siNA | B GuGuGGuGAGcAGAAGuGGTT B | 1686 |
| | | | | stab18 | | |
| 283 | CCUUCGAACAUCAGACCUACUGC | 1483 | 33669 | MAPK3: 303L21 antisense siNA | AGuAGGucuGAuGuucGAATsT | 1687 |
| | | | | (285C) stab08 | | |
| 709 | UGAACUCCAAGGGCUAUACCAAG | 1484 | 33670 | MAPK3: 729L21 antisense siNA | uGGuAuAGcccuuGGAGuuTsT | 1688 |
| | | | | (711C) stab08 | | |
| 716 | CAAGGGCUAUACCAAGUCCAUCG | 1485 | 33671 | MAPK3: 736L21 antisense siNA | AuGGAcuuGGuAuAGcccuTsT | 1689 |
| | | | | (718C) stab08 | | |
| 718 | AGGGCUAUACCAAGUCCAUCGAC | 1486 | 33672 | MAPK3: 738L21 antisense siNA | cGAuGGAcuuGGuAuAGccTsT | 1690 |
| | | | | (720C) stab08 | | |
| 1045 | ACCUGGAGCAGUACUAUGACCCG | 1487 | 33673 | MAPK3: 1065L21 antisense siNA | GGucAuAGuAcuGcuccAGTsT | 1691 |
| | | | | (1047C) stab08 | | |
| 1305 | CUCCCGCCAGACUGUUAGAAAAU | 1488 | 33674 | MAPK3: 1325L21 antisense siNA | uuucuAAcAGucuGGcGGGTsT | 1692 |
| | | | | (1307C) stab08 | | |
| 1778 | UUCUGUGUGUGGUGAGCAGAAGU | 1489 | 33675 | MAPK3: 1798L21 antisense siNA | uucuGcucAccAcAcAcAGTsT | 1693 |
| | | | | (1780C) stab08 | | |
| 1782 | GUGUGUGGUGAGCAGAAGUGGAG | 1490 | 33676 | MAPK3: 1802L21 antisense siNA | ccAcuucuGcucAccAcAcTsT | 1694 |
| | | | | (1784C) stab08 | | |
| 283 | CCUUCGAACAUCAGACCUACUGC | 1483 | 33653 | MAPK3: 285U21 sense siNA | B UUCGAACAUCAGACCUACUTT B | 1695 |
| | | | | stab09 | | |
| 709 | UGAACUCCAAGGGCUAUACCAAG | 1484 | 33654 | MAPK3: 711U21 sense siNA | B AACUCCAAGGGCUAUACCATT B | 1696 |
| | | | | stab09 | | |
| 716 | CAAGGGCUAUACCAAGUCCAUCG | 1485 | 33655 | MAPK3: 718U21 sense siNA | B AGGGCUAUACCAAGUCCAUTT B | 1697 |
| | | | | stab09 | | |
| 718 | AGGGCUAUACCAAGUCCAUCGAC | 1486 | 33656 | MAPK3: 720U21 sense siNA | B GGCUAUACCAAGUCCAUCGTT B | 1698 |
| | | | | stab09 | | |
| 1045 | ACCUGGAGCAGUACUAUGACCCG | 1487 | 33657 | MAPK3: 1047U21 sense siNA | B CUGGAGCAGUACUAUGACCTT B | 1699 |
| | | | | stab09 | | |
| 1305 | CUCCCGCCAGACUGUUAGAAAAU | 1488 | 33658 | MAPK3: 1307U21 sense siNA | B CCCGCCAGACUGUUAGAAATT B | 1700 |
| | | | | stab09 | | |
| 1778 | UUCUGUGUGUGGUGAGCAGAAGU | 1489 | 33659 | MAPK3: 1780U21 sense siNA | B CUGUGUGUGGUGAGCAGAATT B | 1701 |
| | | | | stab09 | | |
| 1782 | GUGUGUGGUGAGCAGAAGUGGAG | 1490 | 33660 | MAPK3: 1784U21 sense siNA | B GUGUGGUGAGCAGAAGUGGTT B | 1702 |
| | | | | stab09 | | |
| 283 | CCUUCGAACAUCAGACCUACUGC | 1483 | 33661 | MAPK3: 303L21 antisense siNA | AGUAGGUCUGAUGUUCGAATsT | 1703 |
| | | | | (285C) stab10 | | |
| 709 | UGAACUCCAAGGGCUAUACCAAG | 1484 | 33662 | MAPK3: 729L21 antisense siNA | UGGUAUAGCCCUUGGAGUUTsT | 1704 |
| | | | | (711C) stab10 | | |
| 716 | CAAGGGCUAUACCAAGUCCAUCG | 1485 | 33663 | MAPK3: 736L21 antisense siNA | AUGGACUUGGUAUAGCCCUTsT | 1705 |
| | | | | (718C) stab10 | | |
| 718 | AGGGCUAUACCAAGUCCAUCGAC | 1486 | 33664 | MAPK3: 738L21 antisense siNA | CGAUGGACUUGGUAUAGCCTsT | 1706 |
| | | | | (720C) stab10 | | |
| 1045 | ACCUGGAGCAGUACUAUGACCCG | 1487 | 33665 | MAPK3: 1065L21 antisense siNA | GGUCAUAGUACUGCUCCAGTsT | 1707 |
| | | | | (1047C) stab10 | | |
| 1305 | CUCCCGCCAGACUGUUAGAAAAU | 1488 | 33666 | MAPK3: 1325L21 antisense siNA | UUUCUAACAGUCUGGCGGGTsT | 1708 |
| | | | | (1307C) stab10 | | |
| 1778 | UUCUGUGUGUGGUGAGCAGAAGU | 1489 | 33667 | MAPK3: 1798L21 antisense siNA | UUCUGCUCACCACACACAGTsT | 1709 |
| | | | | (1780C) stab10 | | |
| 1782 | GUGUGUGGUGAGCAGAAGUGGAG | 1490 | 33668 | MAPK3: 1802L21 antisense siNA | CCACUUCUGCUCACCACACTsT | 1710 |
| | | | | (1784C) stab10 | | |
| 283 | CCUUCGAACAUCAGACCUACUGC | 1483 | | MAPK3: 303L21 antisense siNA | AGuAGGucuGAuGuucGAATT B | 1711 |
| | | | | (285C) stab19 | | |
| 709 | UGAACUCCAAGGGCUAUACCAAG | 1484 | | MAPK3: 729L21 antisense siNA | uGGuAuAGcccuuGGAGuuTT B | 1712 |
| | | | | (711C) stab19 | | |
| 716 | CAAGGGCUAUACCAAGUCCAUCG | 1485 | | MAPK3: 736L21 antisense siNA | AuGGAcuuGGuAuAGcccuTT B | 1713 |
| | | | | (718C) stab19 | | |
| 718 | AGGGCUAUACCAAGUCCAUCGAC | 1486 | | MAPK3: 738L21 antisense siNA | cGAuGGAcuuGGuAuAGccTT B | 1714 |
| | | | | (720C) stab19 | | |
| 1045 | ACCUGGAGCAGUACUAUGACCCG | 1487 | | MAPK3: 1065L21 antisense siNA | GGucAuAGuAcuGcuccAGTT B | 1715 |
| | | | | (1047C) stab19 | | |
| 1305 | CUCCCGCCAGACUGUUAGAAAAU | 1488 | | MAPK3: 1325L21 antisense siNA | uuucuAAcAGucuGGcGGGTT B | 1716 |
| | | | | (1307C) stab19 | | |
| 1778 | UUCUGUGUGUGGUGAGCAGAAGU | 1489 | | MAPK3: 1798L21 antisense siNA | uucuGcucAccAcAcAcAGTT B | 1717 |
| | | | | (1780C) stab19 | | |
| 1782 | GUGUGUGGUGAGCAGAAGUGGAG | 1490 | | MAPK3: 1802L21 antisense siNA | ccAcuucuGcucAccAcAcTT B | 1718 |
| | | | | (1784C) stab19 | | |
| 283 | CCUUCGAACAUCAGACCUACUGC | 1483 | | MAPK3: 303L21 antisense siNA | AGUAGGUCUGAUGUUCGAATT B | 1719 |
| | | | | (285C) stab22 | | |
| 709 | UGAACUCCAAGGGCUAUACCAAG | 1484 | | MAPK3: 729L21 antisense siNA | UGGUAUAGCCCUUGGAGUUTT B | 1720 |
| | | | | (711C) stab22 | | |
| 716 | CAAGGGCUAUACCAAGUCCAUCG | 1485 | | MAPK3: 736L21 antisense siNA | AUGGACUUGGUAUAGCCCUTT B | 1721 |
| | | | | (718C) stab22 | | |
| 718 | AGGGCUAUACCAAGUCCAUCGAC | 1486 | | MAPK3: 738L21 antisense siNA | CGAUGGACUUGGUAUAGCCTT B | 1722 |
| | | | | (720C) stab22 | | |
| 1045 | ACCUGGAGCAGUACUAUGACCCG | 1487 | | MAPK3: 1065L21 antisense siNA | GGUCAUAGUACUGCUCCAGTT B | 1723 |
| | | | | (1047C) stab22 | | |
| 1305 | CUCCCGCCAGACUGUUAGAAAAU | 1488 | | MAPK3: 1325L21 antisense siNA | UUUCUAACAGUCUGGCGGGTT B | 1724 |
| | | | | (1307C) stab22 | | |
| 1778 | UUCUGUGUGUGGUGAGCAGAAGU | 1489 | | MAPK3: 1798L21 antisense siNA | UUCUGCUCACCACACACAGTT B | 1725 |
| | | | | (1780C) stab22 | | |
| 1782 | GUGUGUGGUGAGCAGAAGUGGAG | 1490 | | MAPK3: 1802L21 antisense siNA | CCACUUCUGCUCACCACACTT B | 1726 |
| | | | | (1784C) stab22 | | |

MAPK8 NM_002750.2|

| | | | | | | |
|---|---|---|---|---|---|---|
| 25 | GAAGCAAGCGUGACAACAAUUUU | 1491 | | MAPK8: 27U21 sense siNA | AGCAAGCGUGACAACAAUUTT | 1727 |
| 733 | AACAGCUUGGAACACCAUGUCCU | 1492 | 31517 | MAPK8: 735U21 sense siNA | CAGCUUGGAACACCAUGUCTT | 1728 |
| 852 | CUUUUCCCAGCUGACUCAGAACA | 1493 | | MAPK8: 854U21 sense siNA | UUUCCCAGCUGACUCAGAATT | 1729 |
| 853 | UUUUCCCAGCUGACUCAGAACAC | 1494 | 31518 | MAPK8: 855U21 sense siNA | UUCCCAGCUGACUCAGAACTT | 1730 |
| 878 | CAAACUUAAAGCCAGUCAGGCAA | 1495 | | MAPK8: 880U21 sense siNA | AACUUAAAGCCAGUCAGGCTT | 1731 |
| 895 | AGGCAAGGGAUUUGUUAUCCAAA | 1496 | | MAPK8: 897U21 sense siNA | GCAAGGGAUUUGUUAUCCATT | 1732 |
| 1224 | CAAUGUCAACAGAUCCGACUUUG | 1497 | 31519 | MAPK8: 1226U21 sense siNA | AUGUCAACAGAUCCGACUUTT | 1733 |
| 1242 | CUUUGGCCUCUGAUACAGACAGC | 1498 | 31520 | MAPK8: 1244U21 sense siNA | UUGGCCUCUGAUACAGACATT | 1734 |
| 25 | GAAGCAAGCGUGACAACAAUUUU | 1491 | | MAPK8: 45L21 antisense siNA | AAUUGUUGUCACGCUUGCUTT | 1735 |
| | | | | (27C) | | |
| 733 | AACAGCUUGGAACACCAUGUCCU | 1492 | 31521 | MAPK8: 753L21 antisense siNA | GACAUGGUGUUCCAAGCUGTT | 1736 |
| | | | | (735C) | | |
| 852 | CUUUUCCCAGCUGACUCAGAACA | 1493 | | MAPK8: 872L21 antisense siNA | UUCUGAGUCAGCUGGGAAATT | 1737 |
| | | | | (854C) | | |
| 853 | UUUUCCCAGCUGACUCAGAACAC | 1494 | 31522 | MAPK8: 873L21 antisense siNA | GUUCUGAGUCAGCUGGGAATT | 1738 |
| | | | | (855C) | | |
| 878 | CAAACUUAAAGCCAGUCAGGCAA | 1495 | | MAPK8: 898L21 antisense siNA | GCCUGACUGGCUUUAAGUUTT | 1739 |
| | | | | (880C) | | |
| 895 | AGGCAAGGGAUUUGUUAUCCAAA | 1496 | | MAPK8: 915L21 antisense siNA | UGGAUAACAAAUCCCUUGCTT | 1740 |
| | | | | (897C) | | |
| 1224 | CAAUGUCAACAGAUCCGACUUUG | 1497 | 31523 | MAPK8: 1244L21 antisense siNA | AAGUCGGAUCUGUUGACAUTT | 1741 |
| | | | | (1226C) | | |
| 1242 | CUUUGGCCUCUGAUACAGACAGC | 1498 | 31524 | MAPK8: 1262L21 antisense siNA | UGUCUGUAUCAGAGGCCAATT | 1742 |
| | | | | (1244C) | | |
| 25 | GAAGCAAGCGUGACAACAAUUUU | 1491 | | MAPK8: 27U21 sense siNA | B AGcAAGcGuGAcAAcAAuuTT B | 1743 |
| | | | | stab04 | | |
| 733 | AACAGCUUGGAACACCAUGUCCU | 1492 | | MAPK8: 735U21 sense siNA | B cAGcuuGGAAcAccAuGucTT B | 1744 |
| | | | | stab04 | | |
| 852 | CUUUUCCCAGCUGACUCAGAACA | 1493 | | MAPK8: 854U21 sense siNA | B uuucccAGcuGAcucAGAATT B | 1745 |
| | | | | stab04 | | |
| 853 | UUUUCCCAGCUGACUCAGAACAC | 1494 | | MAPK8: 855U21 sense siNA | B uucccAGcuGAcucAGAAcTT B | 1746 |
| | | | | stab04 | | |
| 878 | CAAACUUAAAGCCAGUCAGGCAA | 1495 | | MAPK8: 880U21 sense siNA | B AAcuuAAAGccAGucAGGcTT B | 1747 |
| | | | | stab04 | | |
| 895 | AGGCAAGGGAUUUGUUAUCCAAA | 1496 | | MAPK8: 897U21 sense siNA | B GcAAGGGAuuuGuuAuccATT B | 1748 |
| | | | | stab04 | | |
| 1224 | CAAUGUCAACAGAUCCGACUUUG | 1497 | | MAPK8: 1226U21 sense siNA | B AuGucAAcAGAuccGAcuuTT B | 1749 |
| | | | | stab04 | | |
| 1242 | CUUUGGCCUCUGAUACAGACAGC | 1498 | | MAPK8: 1244U21 sense siNA | B uuGGccucuGAuAcAGAcATT B | 1750 |
| | | | | stab04 | | |
| 25 | GAAGCAAGCGUGACAACAAUUUU | 1491 | | MAPK8: 45L21 antisense siNA | AAuuGuuGucAcGcuuGcuTsT | 1751 |
| | | | | (27C) stab05 | | |
| 733 | AACAGCUUGGAACACCAUGUCCU | 1492 | | MAPK8: 753L21 antisense siNA | GAcAuGGuGuuccAAGcuGTsT | 1752 |
| | | | | (735C) stab05 | | |
| 852 | CUUUUCCCAGCUGACUCAGAACA | 1493 | | MAPK8: 872L21 antisense siNA | uucuGAGucAGcuGGGAAATsT | 1753 |
| | | | | (854C) stab05 | | |
| 853 | UUUUCCCAGCUGACUCAGAACAC | 1494 | | MAPK8: 873L21 antisense siNA | GuucuGAGucAGcuGGGAATsT | 1754 |
| | | | | (855C) stab05 | | |
| 878 | CAAACUUAAAGCCAGUCAGGCAA | 1495 | | MAPK8: 898L21 antisense siNA | GccuGAcuGGcuuuAAGuuTsT | 1755 |
| | | | | (880C) stab05 | | |
| 895 | AGGCAAGGGAUUUGUUAUCCAAA | 1496 | | MAPK8: 915L21 antisense siNA | uGGAuAAcAAAucccuuGcTsT | 1756 |
| | | | | (897C) stab05 | | |
| 1224 | CAAUGUCAACAGAUCCGACUUUG | 1497 | | MAPK8: 1244L21 antisense siNA | AAGucGGAucuGuuGAcAuTsT | 1757 |
| | | | | (1226C) stab05 | | |
| 1242 | CUUUGGCCUCUGAUACAGACAGC | 1498 | | MAPK8: 1262L21 antisense siNA | uGucuGuAucAGAGGccAATsT | 1758 |
| | | | | (1244C) stab05 | | |
| 25 | GAAGCAAGCGUGACAACAAUUUU | 1491 | | MAPK8: 27U21 sense siNA | B AGcAAGcGuGAcAAcAAuuTT B | 1759 |
| | | | | stab07 | | |
| 733 | AACAGCUUGGAACACCAUGUCCU | 1492 | | MAPK8: 735U21 sense siNA | B cAGcuuGGAAcAccAuGucTT B | 1760 |
| | | | | stab07 | | |
| 852 | CUUUUCCCAGCUGACUCAGAACA | 1493 | | MAPK8: 854U21 sense siNA | B uuucccAGcuGAcucAGAATT B | 1761 |
| | | | | stab07 | | |
| 853 | UUUUCCCAGCUGACUCAGAACAC | 1494 | | MAPK8: 855U21 sense siNA | B uucccAGcuGAcucAGAAcTT B | 1762 |
| | | | | stab07 | | |
| 878 | CAAACUUAAAGCCAGUCAGGCAA | 1495 | | MAPK8: 880U21 sense siNA | B AAcuuAAAGccAGucAGGcTT B | 1763 |
| | | | | stab07 | | |
| 895 | AGGCAAGGGAUUUGUUAUCCAAA | 1496 | | MAPK8: 897U21 sense siNA | B GcAAGGGAuuuGuuAuccATT B | 1764 |
| | | | | stab07 | | |
| 1224 | CAAUGUCAACAGAUCCGACUUUG | 1497 | 31866 | MAPK8: 1226U21 sense siNA | B AuGucAAcAGAuccGAcuuTT B | 1765 |
| | | | | stab07 | | |
| 1242 | CUUUGGCCUCUGAUACAGACAGC | 1498 | | MAPK8: 1244U21 sense siNA | B uuGGccucuGAuAcAGAcATT B | 1766 |
| | | | | stab07 | | |
| 25 | GAAGCAAGCGUGACAACAAUUUU | 1491 | | MAPK8: 45L21 antisense siNA | AAuuGuuGucAcGcuuGcuTsT | 1767 |
| | | | | (27C) stab11 | | |
| 733 | AACAGCUUGGAACACCAUGUCCU | 1492 | | MAPK8: 753L21 antisense siNA | GAcAuGGuGuuccAAGcuGTsT | 1768 |
| | | | | (735C) stab11 | | |
| 852 | CUUUUCCCAGCUGACUCAGAACA | 1493 | | MAPK8: 872L21 antisense siNA | uucuGAGucAGcuGGGAAATsT | 1769 |
| | | | | (854C) stab11 | | |
| 853 | UUUUCCCAGCUGACUCAGAACAC | 1494 | | MAPK8: 873L21 antisense siNA | GuucuGAGucAGcuGGGAATsT | 1770 |
| | | | | (855C) stab11 | | |
| 878 | CAAACUUAAAGCCAGUCAGGCAA | 1495 | | MAPK8: 898L21 antisense siNA | GccuGAcuGGcuuuAAGuuTsT | 1771 |
| | | | | (880C) stab11 | | |
| 895 | AGGCAAGGGAUUUGUUAUCCAAA | 1496 | | MAPK8: 915L21 antisense siNA | uGGAuAAcAAAucccuuGcTsT | 1772 |
| | | | | (897C) stab11 | | |
| 1224 | CAAUGUCAACAGAUCCGACUUUG | 1497 | | MAPK8: 1244L21 antisense siNA | AAGucGGAucuGuuGAcAuTsT | 1773 |
| | | | | (1226C) stab11 | | |
| 1242 | CUUUGGCCUCUGAUACAGACAGC | 1498 | | MAPK8: 1262L21 antisense siNA | uGucuGuAucAGAGGccAATsT | 1774 |
| | | | | (1244C) stab11 | | |
| 25 | GAAGCAAGCGUGACAACAAUUUU | 1491 | | MAPK8: 27U21 sense siNA | B AGcAAGcGuGAcAAcAAuuTT B | 1775 |
| | | | | stab18 | | |
| 733 | AACAGCUUGGAACACCAUGUCCU | 1492 | | MAPK8: 735U21 sense siNA | B cAGcuuGGAAcAccAuGucTT B | 1776 |
| | | | | stab18 | | |
| 852 | CUUUUCCCAGCUGACUCAGAACA | 1493 | | MAPK8: 854U21 sense siNA | B uuucccAGcuGAcucAGAATT B | 1777 |
| | | | | stab18 | | |
| 853 | UUUUCCCAGCUGACUCAGAACAC | 1494 | | MAPK8: 855U21 sense siNA | B uucccAGcuGAcucAGAAcTT B | 1778 |
| | | | | stab18 | | |
| 878 | CAAACUUAAAGCCAGUCAGGCAA | 1495 | | MAPK8: 880U21 sense siNA | B AAcuuAAAGccAGucAGGcTT B | 1779 |
| | | | | stab18 | | |
| 895 | AGGCAAGGGAUUUGUUAUCCAAA | 1496 | | MAPK8: 897U21 sense siNA | B GcAAGGGAuuuGuuAuccATT B | 1780 |
| | | | | stab18 | | |
| 1224 | CAAUGUCAACAGAUCCGACUUUG | 1497 | | MAPK8: 1226U21 sense siNA | B AuGucAAcAGAuccGAcuuTT B | 1781 |
| | | | | stab18 | | |
| 1242 | CUUUGGCCUCUGAUACAGACAGC | 1498 | | MAPK8: 1244U21 sense siNA | B uuGGccucuGAuAcAGAcATT B | 1782 |
| | | | | stab18 | | |
| 25 | GAAGCAAGCGUGACAACAAUUUU | 1491 | | MAPK8: 45L21 antisense siNA | AAuuGuuGucAcGcuuGcuTsT | 1783 |
| | | | | (27C) stab08 | | |
| 733 | AACAGCUUGGAACACCAUGUCCU | 1492 | | MAPK8: 753L21 antisense siNA | GAcAuGGuGuuccAAGcuGTsT | 1784 |
| | | | | (735C) stab08 | | |
| 852 | CUUUUCCCAGCUGACUCAGAACA | 1493 | | MAPK8: 872L21 antisense siNA | uucuGAGucAGcuGGGAAATsT | 1785 |
| | | | | (854C) stab08 | | |
| 853 | UUUUCCCAGCUGACUCAGAACAC | 1494 | | MAPK8: 873L21 antisense siNA | GuucuGAGucAGcuGGGAATsT | 1786 |
| | | | | (855C) stab08 | | |
| 878 | CAAACUUAAAGCCAGUCAGGCAA | 1495 | | MAPK8: 898L21 antisense siNA | GccuGAcuGGcuuuAAGuuTsT | 1787 |
| | | | | (880C) stab08 | | |
| 895 | AGGCAAGGGAUUUGUUAUCCAAA | 1496 | | MAPK8: 915L21 antisense siNA | uGGAuAAcAAAucccuuGcTsT | 1788 |
| | | | | (897C) stab08 | | |
| 1224 | CAAUGUCAACAGAUCCGACUUUG | 1497 | 31872 | MAPK8: 1244L21 antisense siNA | AAGucGGAucuGuuGAcAuTsT | 1789 |
| | | | | (1226C) stab08 | | |
| 1242 | CUUUGGCCUCUGAUACAGACAGC | 1498 | | MAPK8: 1262L21 antisense siNA | uGucuGuAucAGAGGccAATsT | 1790 |
| | | | | (1244C) stab08 | | |
| 25 | GAAGCAAGCGUGACAACAAUUUU | 1491 | | MAPK8: 27U21 sense siNA | B AGCAAGCGUGACAACAAUUTT B | 1791 |
| | | | | stab09 | | |
| 733 | AACAGCUUGGAACACCAUGUCCU | 1492 | | MAPK8: 735U21 sense siNA | B CAGCUUGGAACACCAUGUCTT B | 1792 |
| | | | | stab09 | | |
| 852 | CUUUUCCCAGCUGACUCAGAACA | 1493 | | MAPK8: 854U21 sense siNA | B UUUCCCAGCUGACUCAGAATT B | 1793 |
| | | | | stab09 | | |
| 853 | UUUUCCCAGCUGACUCAGAACAC | 1494 | | MAPK8: 855U21 sense siNA | B UUCCCAGCUGACUCAGAACTT B | 1794 |
| | | | | stab09 | | |
| 878 | CAAACUUAAAGCCAGUCAGGCAA | 1495 | | MAPK8: 880U21 sense siNA | B AACUUAAAGCCAGUCAGGCTT B | 1795 |
| | | | | stab09 | | |
| 895 | AGGCAAGGGAUUUGUUAUCCAAA | 1496 | | MAPK8: 897U21 sense siNA | B GCAAGGGAUUUGUUAUCCATT B | 1796 |
| | | | | stab09 | | |
| 1224 | CAAUGUCAACAGAUCCGACUUUG | 1497 | | MAPK8: 1226U21 sense siNA | B AUGUCAACAGAUCCGACUUTT B | 1797 |
| | | | | stab09 | | |
| 1242 | CUUUGGCCUCUGAUACAGACAGC | 1498 | | MAPK8: 1244U21 sense siNA | B UUGGCCUCUGAUACAGACATT B | 1798 |
| | | | | stab09 | | |
| 25 | GAAGCAAGCGUGACAACAAUUUU | 1491 | | MAPK8: 45L21 antisense siNA | AAUUGUUGUCACGCUUGCUTsT | 1799 |
| | | | | (27C) stab10 | | |
| 733 | AACAGCUUGGAACACCAUGUCCU | 1492 | | MAPK8: 753L21 antisense siNA | GACAUGGUGUUCCAAGCUGTsT | 1800 |
| | | | | (735C) stab10 | | |
| 852 | CUUUUCCCAGCUGACUCAGAACA | 1493 | | MAPK8: 872L21 antisense siNA | UUCUGAGUCAGCUGGGAAATsT | 1801 |
| | | | | (854C) stab10 | | |
| 853 | UUUUCCCAGCUGACUCAGAACAC | 1494 | | MAPK8: 873L21 antisense siNA | GUUCUGAGUCAGCUGGGAATsT | 1802 |
| | | | | (855C) stab10 | | |
| 878 | CAAACUUAAAGCCAGUCAGGCAA | 1495 | | MAPK8: 898L21 antisense siNA | GCCUGACUGGCUUUAAGUUTsT | 1803 |
| | | | | (880C) stab10 | | |
| 895 | AGGCAAGGGAUUUGUUAUCCAAA | 1496 | | MAPK8: 915L21 antisense siNA | UGGAUAACAAAUCCCUUGCTsT | 1804 |
| | | | | (897C) stab10 | | |
| 1224 | CAAUGUCAACAGAUCCGACUUUG | 1497 | | MAPK8: 1244L21 antisense siNA | AAGUCGGAUCUGUUGACAUTsT | 1805 |
| | | | | (1226C) stab10 | | |
| 1242 | CUUUGGCCUCUGAUACAGACAGC | 1498 | | MAPK8: 1262L21 antisense siNA | UGUCUGUAUCAGAGGCCAATsT | 1806 |
| | | | | (1244C) stab10 | | |
| 25 | GAAGCAAGCGUGACAACAAUUUU | 1491 | | MAPK8: 45L21 antisense siNA | AAuuGuuGucAcGcuuGcuTT B | 1807 |
| | | | | (27C) stab19 | | |
| 733 | AACAGCUUGGAACACCAUGUCCU | 1492 | | MAPK8: 753L21 antisense siNA | GAcAuGGuGuuccAAGcuGTT B | 1808 |
| | | | | (735C) stab19 | | |
| 852 | CUUUUCCCAGCUGACUCAGAACA | 1493 | | MAPK8: 872L21 antisense siNA | uucuGAGucAGcuGGGAAATT B | 1809 |
| | | | | (854C) stab19 | | |
| 853 | UUUUCCCAGCUGACUCAGAACAC | 1494 | | MAPK8: 873L21 antisense siNA | GuucuGAGucAGcuGGGAATT B | 1810 |
| | | | | (855C) stab19 | | |
| 878 | CAAACUUAAAGCCAGUCAGGCAA | 1495 | | MAPK8: 898L21 antisense siNA | GccuGAcuGGcuuuAAGuuTT B | 1811 |
| | | | | (880C) stab19 | | |
| 895 | AGGCAAGGGAUUUGUUAUCCAAA | 1496 | | MAPK8: 915L21 antisense siNA | uGGAuAAcAAAucccuuGcTT B | 1812 |
| | | | | (897C) stab19 | | |
| 1224 | CAAUGUCAACAGAUCCGACUUUG | 1497 | | MAPK8: 1244L21 antisense siNA | AAGucGGAucuGuuGAcAuTT B | 1813 |
| | | | | (1226C) stab19 | | |
| 1242 | CUUUGGCCUCUGAUACAGACAGC | 1498 | | MAPK8: 1262L21 antisense siNA | uGucuGuAucAGAGGccAATT B | 1814 |
| | | | | (1244C) stab19 | | |
| 25 | GAAGCAAGCGUGACAACAAUUUU | 1491 | | MAPK8: 45L21 antisense siNA | AAUUGUUGUCACGCUUGCUTT B | 1815 |
| | | | | (27C) stab22 | | |
| 733 | AACAGCUUGGAACACCAUGUCCU | 1492 | | MAPK8: 753L21 antisense siNA | GACAUGGUGUUCCAAGCUGTT B | 1816 |
| | | | | (735C) stab22 | | |
| 852 | CUUUUCCCAGCUGACUCAGAACA | 1493 | | MAPK8: 872L21 antisense siNA | UUCUGAGUCAGCUGGGAAATT B | 1817 |
| | | | | (854C) stab22 | | |
| 853 | UUUUCCCAGCUGACUCAGAACAC | 1494 | | MAPK8: 873L21 antisense siNA | GUUCUGAGUCAGCUGGGAATT B | 1818 |
| | | | | (855C) stab22 | | |
| 878 | CAAACUUAAAGCCAGUCAGGCAA | 1495 | | MAPK8: 898L21 antisense siNA | GCCUGACUGGCUUUAAGUUTT B | 1819 |
| | | | | (880C) stab22 | | |
| 895 | AGGCAAGGGAUUUGUUAUCCAAA | 1496 | | MAPK8: 915L21 antisense siNA | UGGAUAACAAAUCCCUUGCTT B | 1820 |
| | | | | (897C) stab22 | | |
| 1224 | CAAUGUCAACAGAUCCGACUUUG | 1497 | | MAPK8: 1244L21 antisense siNA | AAGUCGGAUCUGUUGACAUTT B | 1821 |
| | | | | (1226C) stab22 | | |
| 1242 | CUUUGGCCUCUGAUACAGACAGC | 1498 | | MAPK8: 1262L21 antisense siNA | UGUCUGUAUCAGAGGCCAATT B | 1822 |
| | | | | (1244C) stab22 | | |
| 1224 | CAAUGUCAACAGAUCCGACUUUG | 1497 | 31890 | MAPK8: 1226U21 sense siNA inv | B uucAGccuAGAcAAcuGuATT B | 1823 |
| | | | | stab07 | | |
| 1224 | CAAUGUCAACAGAUCCGACUUUG | 1497 | 31896 | MAPK8: 1244L21 antisense siNA | uAcAGuuGucuAGGcuGAATsT | 1824 |
| | | | | (1226C) inv stab08 | | |

MAPK14-2 NM_139012

| | | | | | | |
|---|---|---|---|---|---|---|
| 1278 | GCCUACUUUGCUCAGUACCACGA | 1499 | 31586 | MAPK14: 1280U21 sense siNA | CUACUUUGCUCAGUACCACTT | 1825 |
| 1609 | UGUCUGUCUUUGUGGGAGGGUAA | 1500 | 31587 | MAPK14: 1611U21 sense siNA | UUUGUCUUUGUGGGAGGGUTT | 1826 |
| 1959 | ACCAACUGGCUUCUGUGCACUAG | 1501 | | MAPK14: 1961U21 sense siNA | CAACUGGCUUCUGUGCACUTT | 1827 |
| 2359 | AGCAGAGUGAGGAUGUGUUUUGC | 1502 | | MAPK14: 2361U21 sense siNA | CAGAGUGAGGAUGUGUUUUTT | 1828 |
| 2482 | AUCCCAUGUCACCUCAGCUGAUA | 1503 | | MAPK14: 2484U21 sense siNA | CCCAUGUCACCUCAGCUGATT | 1829 |
| 2882 | AAAAGGGUCUUCUUGGCAGCUUA | 1504 | 31588 | MAPK14: 2884U21 sense siNA | AAGGGUCUUCUUGGCAGCUTT | 1830 |
| 3554 | GGACUCUAAGCUGGAGCUCUUGG | 1505 | 31589 | MAPK14: 3556U21 sense siNA | ACUCUAAGCUGGAGCUCUUTT | 1831 |
| 3683 | UUGGCUGUAAUCAGUUAUGCCGU | 1506 | | MAPK14: 3685U21 sense siNA | GGCUGUAAUCAGUUAUGCCTT | 1832 |
| 1278 | GCCUACUUUGCUCAGUACCACGA | 1499 | 31590 | MAPK14: 1298L21 antisense | GUGGUACUGAGCAAAGUAGTT | 1833 |
| | | | | siNA (1280C) | | |
| 1609 | UGUCUGUCUUUGUGGGAGGGUAA | 1500 | 31591 | MAPK14: 1629L21 antisense | ACCCUCCCACAAAGACAGATT | 1834 |
| | | | | siNA (1611C) | | |
| 1959 | ACCAACUGGCUUCUGUGCACUAG | 1501 | | MAPK14: 1979L21 antisense | AGUGCACAGAAGCCAGUUGTT | 1835 |
| | | | | siNA (1961C) | | |
| 2359 | AGCAGAGUGAGGAUGUGUUUUGC | 1502 | | MAPK14: 2379L21 antisense | AAAACACAUCCUCACUCUGTT | 1836 |
| | | | | siNA (2361C) | | |
| 2482 | AUCCCAUGUCACCUCAGCUGAUA | 1503 | | MAPK14: 2502L21 antisense | UCAGCUGAGGUGACAUGGGTT | 1837 |
| | | | | siNA (2484C) | | |
| 2882 | AAAAGGGUCUUCUUGGCAGCUUA | 1504 | 31592 | MAPK14: 2902L21 antisense | AGCUGCCAAGAAGACCCUUTT | 1838 |
| | | | | siNA (2884C) | | |
| 3554 | GGACUCUAAGCUGGAGCUCUUGG | 1505 | 31593 | MAPK14: 3574L21 antisense | AAGAGCUCCAGCUUAGAGUTT | 1839 |
| | | | | siNA (3556C) | | |
| 3683 | UUGGCUGUAAUCAGUUAUGCCGU | 1506 | | MAPK14: 3703L21 antisense | GGCAUAACUGAUUACAGCCTT | 1840 |
| | | | | siNA (3685C) | | |
| 1278 | GCCUACUUUGCUCAGUACCACGA | 1499 | | MAPK14: 1280U21 sense siNA | B cuAcuuuGcucAGuAccAcTT B | 1841 |
| | | | | stab04 | | |
| 1609 | UGUCUGUCUUUGUGGGAGGGUAA | 1500 | | MAPK14: 1611U21 sense siNA | B ucuGucuuuGuGGGAGGGuTT B | 1842 |
| | | | | stab04 | | |
| 1959 | ACCAACUGGCUUCUGUGCACUAG | 1501 | | MAPK14: 1961U21 sense siNA | B cAAcuGGcuucuGuGcAcuTT B | 1843 |
| | | | | stab04 | | |
| 2359 | AGCAGAGUGAGGAUGUGUUUUGC | 1502 | | MAPK14: 2361U21 sense siNA | B cAGAGuGAGGAuGuGuuuuTT B | 1844 |
| | | | | stab04 | | |
| 2482 | AUCCCAUGUCACCUCAGCUGAUA | 1503 | | MAPK14: 2484U21 sense siNA | B cccAuGucAccucAGcuGATT B | 1845 |
| | | | | stab04 | | |
| 2882 | AAAAGGGUCUUCUUGGCAGCUUA | 1504 | | MAPK14: 2884U21 sense siNA | B AAGGGucuucuuGGcAGcuTT B | 1846 |
| | | | | stab04 | | |
| 3554 | GGACUCUAAGCUGGAGCUCUUGG | 1505 | | MAPK14: 3556U21 sense siNA | B AcucuAAGcuGGAGcucuuTT B | 1847 |
| | | | | stab04 | | |
| 3683 | UUGGCUGUAAUCAGUUAUGCCGU | 1506 | | MAPK14: 3685U21 sense siNA | B GGcuGuAAucAGuuAuGccTT B | 1848 |
| | | | | stab04 | | |
| 1278 | GCCUACUUUGCUCAGUACCACGA | 1499 | | MAPK14: 1298L21 antisense | GuGGuAcuGAGcAAAGuAGTsT | 1849 |
| | | | | siNA (1280C) stab05 | | |
| 1609 | UGUCUGUCUUUGUGGGAGGGUAA | 1500 | | MAPK14: 1629L21 antisense | AcccucccAcAAAGAcAGATsT | 1850 |
| | | | | siNA (1611C) stab05 | | |
| 1959 | ACCAACUGGCUUCUGUGCACUAG | 1501 | | MAPK14: 1979L21 antisense | AGuGcAcAGAAGccAGuuGTsT | 1851 |
| | | | | siNA (1961C) stab05 | | |
| 2359 | AGCAGAGUGAGGAUGUGUUUUGC | 1502 | | MAPK14: 2379L21 antisense | AAAAcAcAuccucAcucuGTsT | 1852 |
| | | | | siNA (2361C) stab05 | | |
| 2482 | AUCCCAUGUCACCUCAGCUGAUA | 1503 | | MAPK14: 2502L21 antisense | ucAGcuGAGGuGAcAuGGGTsT | 1853 |
| | | | | siNA (2484C) stab05 | | |
| 2882 | AAAAGGGUCUUCUUGGCAGCUUA | 1504 | | MAPK14: 2902L21 antisense | AGcuGccAAGAAGAcccuuTsT | 1854 |
| | | | | siNA (2884C) stab05 | | |
| 3554 | GGACUCUAAGCUGGAGCUCUUGG | 1505 | | MAPK14: 3574L21 antisense | AAGAGcuccAGcuuAGAGuTsT | 1855 |
| | | | | siNA (3556C) stab05 | | |
| 3683 | UUGGCUGUAAUCAGUUAUGCCGU | 1506 | | MAPK14: 3703L21 antisense | GGcAuAAcuGAuuAcAGccTsT | 1856 |
| | | | | siNA (3685C) stab05 | | |
| 1278 | GCCUACUUUGCUCAGUACCACGA | 1499 | | MAPK14: 1280U21 sense siNA | B cuAcuuuGcucAGuAccAcTT B | 1857 |
| | | | | stab07 | | |
| 1609 | UGUCUGUCUUUGUGGGAGGGUAA | 1500 | | MAPK14: 1611U21 sense siNA | B ucuGucuuuGuGGGAGGGuTT B | 1858 |
| | | | | stab07 | | |
| 1959 | ACCAACUGGCUUCUGUGCACUAG | 1501 | | MAPK14: 1961U21 sense siNA | B cAAcuGGcuucuGuGcAcuTT B | 1859 |
| | | | | stab07 | | |
| 2359 | AGCAGAGUGAGGAUGUGUUUUGC | 1502 | | MAPK14: 2361U21 sense siNA | B cAGAGuGAGGAuGuGuuuuTT B | 1860 |
| | | | | stab07 | | |
| 2482 | AUCCCAUGUCACCUCAGCUGAUA | 1503 | | MAPK14: 2484U21 sense siNA | B cccAuGucAccucAGcuGATT B | 1861 |
| | | | | stab07 | | |
| 2882 | AAAAGGGUCUUCUUGGCAGCUUA | 1504 | | MAPK14: 2884U21 sense siNA | B AAGGGucuucuuGGcAGcuTT B | 1862 |
| | | | | stab07 | | |
| 3554 | GGACUCUAAGCUGGAGCUCUUGG | 1505 | | MAPK14: 3556U21 sense siNA | B AcucuAAGcuGGAGcucuuTT B | 1863 |
| | | | | stab07 | | |
| 3683 | UUGGCUGUAAUCAGUUAUGCCGU | 1506 | | MAPK14: 3685U21 sense siNA | B GGcuGuAAucAGuuAuGccTT B | 1864 |
| | | | | stab07 | | |
| 1278 | GCCUACUUUGCUCAGUACCACGA | 1499 | | MAPK14: 1298L21 antisense | GuGGuAcuGAGcAAAGuAGTsT | 1865 |
| | | | | siNA (1280C) stab11 | | |
| 1609 | UGUCUGUCUUUGUGGGAGGGUAA | 1500 | | MAPK14: 1629L21 antisense | AcccucccAcAAAGAcAGATsT | 1866 |
| | | | | siNA (1611C) stab11 | | |
| 1959 | ACCAACUGGCUUCUGUGCACUAG | 1501 | | MAPK14: 1979L21 antisense | AGuGcAcAGAAGccAGuuGTsT | 1867 |
| | | | | siNA (1961C) stab11 | | |
| 2359 | AGCAGAGUGAGGAUGUGUUUUGC | 1502 | | MAPK14: 2379L21 antisense | AAAAcAcAuccucAcucuGTsT | 1868 |
| | | | | siNA (2361C) stab11 | | |
| 2482 | AUCCCAUGUCACCUCAGCUGAUA | 1503 | | MAPK14: 2502L21 antisense | ucAGcuGAGGuGAcAuGGGTsT | 1869 |
| | | | | siNA (2484C) stab11 | | |
| 2882 | AAAAGGGUCUUCUUGGCAGCUUA | 1504 | | MAPK14: 2902L21 antisense | AGcuGccAAGAAGAcccuuTsT | 1870 |
| | | | | siNA (2884C) stab11 | | |
| 3554 | GGACUCUAAGCUGGAGCUCUUGG | 1505 | | MAPK14: 3574L21 antisense | AAGAGcuccAGcuuAGAGuTsT | 1871 |
| | | | | siNA (3556C) stab11 | | |
| 3683 | UUGGCUGUAAUCAGUUAUGCCGU | 1506 | | MAPK14: 3703L21 antisense | GGcAuAAcuGAuuAcAGccTsT | 1872 |
| | | | | siNA (3685C) stab11 | | |
| 1278 | GCCUACUUUGCUCAGUACCACGA | 1499 | | MAPK14: 1280U21 sense siNA | B cuAcuuuGcucAGuAccAcTT B | 1873 |
| | | | | stab18 | | |
| 1609 | UGUCUGUCUUUGUGGGAGGGUAA | 1500 | | MAPK14: 1611U21 sense siNA | B ucuGucuuuGuGGGAGGGuTT B | 1874 |
| | | | | stab18 | | |
| 1959 | ACCAACUGGCUUCUGUGCACUAG | 1501 | | MAPK14: 1961U21 sense siNA | B cAAcuGGcuucuGuGcAcuTT B | 1875 |
| | | | | stab18 | | |
| 2359 | AGCAGAGUGAGGAUGUGUUUUGC | 1502 | | MAPK14: 2361U21 sense siNA | B cAGAGuGAGGAuGuGuuuuTT B | 1876 |
| | | | | stab18 | | |
| 2482 | AUCCCAUGUCACCUCAGCUGAUA | 1503 | | MAPK14: 2484U21 sense siNA | B cccAuGucAccucAGcuGATT B | 1877 |
| | | | | stab18 | | |
| 2882 | AAAAGGGUCUUCUUGGCAGCUUA | 1504 | | MAPK14: 2884U21 sense siNA | B AAGGGucuucuuGGcAGcuTT B | 1878 |
| | | | | stab18 | | |
| 3554 | GGACUCUAAGCUGGAGCUCUUGG | 1505 | | MAPK14: 3556U21 sense siNA | B AcucuAAGcuGGAGcucuuTT B | 1879 |
| | | | | stab18 | | |
| 3683 | UUGGCUGUAAUCAGUUAUGCCGU | 1506 | | MAPK14: 3685U21 sense siNA | B GGcuGuAAucAGuuAuGccTT B | 1880 |
| | | | | stab18 | | |
| 1278 | GCCUACUUUGCUCAGUACCACGA | 1499 | | MAPK14: 1298L21 antisense | GuGGuAcuGAGcAAAGuAGTsT | 1881 |
| | | | | siNA (1280C) stab08 | | |
| 1609 | UGUCUGUCUUUGUGGGAGGGUAA | 1500 | | MAPK14: 1629L21 antisense | AcccucccAcAAAGAcAGATsT | 1882 |
| | | | | siNA (1611C) stab08 | | |
| 1959 | ACCAACUGGCUUCUGUGCACUAG | 1501 | | MAPK14: 1979L21 antisense | AGuGcAcAGAAGccAGuuGTsT | 1883 |
| | | | | siNA (1961C) stab08 | | |
| 2359 | AGCAGAGUGAGGAUGUGUUUUGC | 1502 | | MAPK14: 2379L21 antisense | AAAAcAcAuccucAcucuGTsT | 1884 |
| | | | | siNA (2361C) stab08 | | |
| 2482 | AUCCCAUGUCACCUCAGCUGAUA | 1503 | | MAPK14: 2502L21 antisense | ucAGcuGAGGuGAcAuGGGTsT | 1885 |
| | | | | siNA (2484C) stab08 | | |
| 2882 | AAAAGGGUCUUCUUGGCAGCUUA | 1504 | | MAPK14: 2902L21 antisense | AGcuGccAAGAAGAcccuuTsT | 1886 |
| | | | | siNA (2884C) stab08 | | |
| 3554 | GGACUCUAAGCUGGAGCUCUUGG | 1505 | | MAPK14: 3574L21 antisense | AAGAGcuccAGcuuAGAGuTsT | 1887 |
| | | | | siNA (3556C) stab08 | | |
| 3683 | UUGGCUGUAAUCAGUUAUGCCGU | 1506 | | MAPK14: 3703L21 antisense | GGcAuAAcuGAuuAcAGccTsT | 1888 |
| | | | | siNA (3685C) stab08 | | |
| 1278 | GCCUACUUUGCUCAGUACCACGA | 1499 | | MAPK14: 1280U21 sense siNA | B CUACUUUGCUCAGUACCACTT B | 1889 |
| | | | | stab09 | | |
| 1609 | UGUCUGUCUUUGUGGGAGGGUAA | 1500 | | MAPK14: 1611U21 sense siNA | B UCUGUCUUUGUGGGAGGGUTT B | 1890 |
| | | | | stab09 | | |
| 1959 | ACCAACUGGCUUCUGUGCACUAG | 1501 | | MAPK14: 1961U21 sense siNA | B CAACUGGCUUCUGUGCACUTT B | 1891 |
| | | | | stab09 | | |
| 2359 | AGCAGAGUGAGGAUGUGUUUUGC | 1502 | | MAPK14: 2361U21 sense siNA | BCAGAGUGAGGAUGUGUUUUTT B | 1892 |
| | | | | stab09 | | |
| 2482 | AUCCCAUGUCACCUCAGCUGAUA | 1503 | | MAPK14: 2484U21 sense siNA | B CCCAUGUCACCUCAGCUGATT B | 1893 |
| | | | | stab09 | | |
| 2882 | AAAAGGGUCUUCUUGGCAGCUUA | 1504 | | MAPK14: 2884U21 sense siNA | B AAGGGUCUUCUUGGCAGCUTT B | 1894 |
| | | | | stab09 | | |
| 3554 | GGACUCUAAGCUGGAGCUCUUGG | 1505 | | MAPK14: 3556U21 sense siNA | B ACUCUAAGCUGGAGCUCUUTT B | 1895 |
| | | | | stab09 | | |
| 3683 | UUGGCUGUAAUCAGUUAUGCCGU | 1506 | | MAPK14: 3685U21 sense siNA | B GGCUGUAAUCAGUUAUGCCTT B | 1896 |
| | | | | stab09 | | |
| 1278 | GCCUACUUUGCUCAGUACCACGA | 1499 | | MAPK14: 1298L21 antisense | GUGGUACUGAGCAAAGUAGTsT | 1897 |
| | | | | siNA (1280C) stab10 | | |
| 1609 | UGUCUGUCUUUGUGGGAGGGUAA | 1500 | | MAPK14: 1629L21 antisense | ACCCUCCCACAAAGACAGATsT | 1898 |
| | | | | siNA (1611C) stab10 | | |
| 1959 | ACCAACUGGCUUCUGUGCACUAG | 1501 | | MAPK14: 1979L21 antisense | AGUGCACAGAAGCCAGUUGTsT | 1899 |
| | | | | siNA (1961C) stab10 | | |
| 2359 | AGCAGAGUGAGGAUGUGUUUUGC | 1502 | | MAPK14: 2379L21 antisense | AAAACACAUCCUCACUCUGTsT | 1900 |
| | | | | siNA (2361C) stab10 | | |
| 2482 | AUCCCAUGUCACCUCAGCUGAUA | 1503 | | MAPK14: 2502L21 antisense | UCAGCUGAGGUGACAUGGGTsT | 1901 |
| | | | | siNA (2484C) stab10 | | |
| 2882 | AAAAGGGUCUUCUUGGCAGCUUA | 1504 | | MAPK14: 2902L21 antisense | AGCUGCCAAGAAGACCCUUTsT | 1902 |
| | | | | siNA (2884C) stab10 | | |
| 3554 | GGACUCUAAGCUGGAGCUCUUGG | 1505 | | MAPK14: 3574L21 antisense | AAGAGCUCCAGCUUAGAGUTsT | 1903 |
| | | | | siNA (3556C) stab10 | | |
| 3683 | UUGGCUGUAAUCAGUUAUGCCGU | 1506 | | MAPK14: 3703L21 antisense | GGCAUAACUGAUUACAGCCTsT | 1904 |
| | | | | siNA (3685C) stab10 | | |
| 1278 | GCCUACUUUGCUCAGUACCACGA | 1499 | | MAPK14: 1298L21 antisense | GuGGuAcuGAGcAAAGuAGTT B | 1905 |
| | | | | siNA (1280C) stab19 | | |
| 1609 | UGUCUGUCUUUGUGGGAGGGUAA | 1500 | | MAPK14: 1629L21 antisense | AcccucccAcAAAGAcAGATT B | 1906 |
| | | | | siNA (1611C) stab19 | | |
| 1959 | ACCAACUGGCUUCUGUGCACUAG | 1501 | | MAPK14: 1979L21 antisense | AGuGcAcAGAAGccAGuuGTT B | 1907 |
| | | | | siNA (1961C) stab19 | | |
| 2359 | AGCAGAGUGAGGAUGUGUUUUGC | 1502 | | MAPK14: 2379L21 antisense | AAAAcAcAuccucAcucuGTT B | 1908 |
| | | | | siNA (2361C) stab19 | | |
| 2482 | AUCCCAUGUCACCUCAGCUGAUA | 1503 | | MAPK14: 2502L21 antisense | ucAGcuGAGGuGAcAuGGGTT B | 1909 |
| | | | | siNA (2484C) stab19 | | |
| 2882 | AAAAGGGUCUUCUUGGCAGCUUA | 1504 | | MAPK14: 2902L21 antisense | AGcuGccAAGAAGAcccuuTT B | 1910 |
| | | | | siNA (2884C) stab19 | | |
| 3554 | GGACUCUAAGCUGGAGCUCUUGG | 1505 | | MAPK14: 3574L21 antisense | AAGAGcuccAGcuuAGAGuTT B | 1911 |
| | | | | siNA (3556C) stab19 | | |
| 3683 | UUGGCUGUAAUCAGUUAUGCCGU | 1506 | | MAPK14: 3703L21 antisense | GGcAuAAcuGAuuAcAGccTT B | 1912 |
| | | | | siNA (3685C) stab19 | | |
| 1278 | GCCUACUUUGCUCAGUACCACGA | 1499 | | MAPK14: 1298L21 antisense | GUGGUACUGAGCAAAGUAGTT B | 1913 |
| | | | | siNA (1280C) stab22 | | |
| 1609 | UGUCUGUCUUUGUGGGAGGGUAA | 1500 | | MAPK14: 1629L21 antisense | ACCCUCCCACAAAGACAGATT B | 1914 |
| | | | | siNA (1611C) stab22 | | |
| 1959 | ACCAACUGGCUUCUGUGCACUAG | 1501 | | MAPK14: 1979L21 antisense | AGUGCACAGAAGCCAGUUGTT B | 1915 |
| | | | | siNA (1961C) stab22 | | |
| 2359 | AGCAGAGUGAGGAUGUGUUUUGC | 1502 | | MAPK14: 2379L21 antisense | AAAACACAUCCUCACUCUGTT B | 1916 |
| | | | | siNA (2361C) stab22 | | |
| 2482 | AUCCCAUGUCACCUCAGCUGAUA | 1503 | | MAPK14: 2502L21 antisense | UCAGCUGAGGUGACAUGGGTT B | 1917 |
| | | | | siNA (2484C) stab22 | | |
| 2882 | AAAAGGGUCUUCUUGGCAGCUUA | 1504 | | MAPK14: 2902L21 antisense | AGCUGCCAAGAAGACCCUUTT B | 1918 |
| | | | | siNA (2884C) stab22 | | |
| 3554 | GGACUCUAAGCUGGAGCUCUUGG | 1505 | | MAPK14: 3574L21 antisense | AAGAGCUCCAGCUUAGAGUTT B | 1919 |
| | | | | siNA (3556C) stab22 | | |
| 3683 | UUGGCUGUAAUCAGUUAUGCCGU | 1506 | | MAPK14: 3703L21 antisense | GGCAUAACUGAUUACAGCCTT B | 1920 |
| | | | | siNA (3685C) stab22 | | |

JUN NM_002228

| | | | | | | |
|---|---|---|---|---|---|---|
| 703 | AGUGACCGCGACUUUUCAAAGCC | 1507 | | JUN: 705U21 sense siNA | UGACCGCGACUUUUCAAAGTT | 1921 |
| 1486 | CAAACCUCAGCAACUUCAACCCA | 1508 | | JUN: 1488U21 sense siNA | AACCUCAGCAACUUCAACCTT | 1922 |
| 1487 | AAACCUCAGCAACUUCAACCCAG | 1509 | | JUN: 1489U21 sense siNA | ACCUCAGCAACUUCAACCCTT | 1923 |
| 1816 | AGGAAAAAGUGAAAACCUUGAAA | 1510 | | JUN: 1818U21 sense siNA | GAAAAAGUGAAAACCUUGATT | 1924 |
| 1817 | GGAAAAAGUGAAAACCUUGAAAG | 1511 | | JUN: 1819U21 sense siNA | AAAAAGUGAAAACCUUGAATT | 1925 |
| 1875 | CUCAGGGAACAGGUGGCACAGCU | 1512 | | JUN: 1877U21 sense siNA | CAGGGAACAGGUGGCACAGTT | 1926 |
| 1901 | ACAGAAAGUCAUGAACCACGUUA | 1513 | | JUN: 1903U21 sense siNA | AGAAAGUCAUGAACCACGUTT | 1927 |
| 1902 | CAGAAAGUCAUGAACCACGUUAA | 1514 | | JUN: 1904U21 sense siNA | GAAAGUCAUGAACCACGUUTT | 1928 |
| 1904 | GAAAGUCAUGAACCACGUUAACA | 1515 | | JUN: 1906U21 sense siNA | AAGUCAUGAACCACGUUAATT | 1929 |
| 1907 | AGUCAUGAACCACGUUAACAGUG | 1516 | | JUN: 1909U21 sense siNA | UCAUGAACCACGUUAACAGTT | 1930 |
| 1924 | ACAGUGGGUGCCAACUCAUGCUA | 1517 | | JUN: 1926U21 sense siNA | AGUGGGUGCCAACUCAUGCTT | 1931 |
| 1930 | GGUGCCAACUCAUGCUAACGCAG | 1518 | | JUN: 1932U21 sense siNA | UGCCAACUCAUGCUAACGCTT | 1932 |
| 1931 | GUGCCAACUCAUGCUAACGCAGC | 1519 | | JUN: 1933U21 sense siNA | GCCAACUCAUGCUAACGCATT | 1933 |
| 1933 | GCCAACUCAUGCUAACGCAGCAG | 1520 | | JUN: 1935U21 sense siNA | CAACUCAUGCUAACGCAGCTT | 1934 |
| 1934 | CCAACUCAUGCUAACGCAGCAGU | 1521 | | JUN: 1936U21 sense siNA | AACUCAUGCUAACGCAGCATT | 1935 |
| 1935 | CAACUCAUGCUAACGCAGCAGUU | 1522 | | JUN: 1937U21 sense siNA | ACUCAUGCUAACGCAGCAGTT | 1936 |
| 2257 | AACAUUGACCAAGAACUGCAUGG | 1523 | | JUN: 2259U21 sense siNA | CAUUGACCAAGAACUGCAUTT | 1937 |
| 2258 | ACAUUGACCAAGAACUGCAUGGA | 1524 | | JUN: 2260U21 sense siNA | AUUGACCAAGAACUGCAUGTT | 1938 |
| 2259 | CAUUGACCAAGAACUGCAUGGAC | 1525 | | JUN: 2261U21 sense siNA | UUGACCAAGAACUGCAUGGTT | 1939 |
| 2260 | AUUGACCAAGAACUGCAUGGACC | 1526 | | JUN: 2262U21 sense siNA | UGACCAAGAACUGCAUGGATT | 1940 |
| 2262 | UGACCAAGAACUGCAUGGACCUA | 1527 | | JUN: 2264U21 sense siNA | ACCAAGAACUGCAUGGACCTT | 1941 |
| 2264 | ACCAAGAACUGCAUGGACCUAAC | 1528 | | JUN: 2266U21 sense siNA | CAAGAACUGCAUGGACCUATT | 1942 |
| 2266 | CAAGAACUGCAUGGACCUAACAU | 1529 | | JUN: 2268U21 sense siNA | AGAACUGCAUGGACCUAACTT | 1943 |
| 2268 | AGAACUGCAUGGACCUAACAUUC | 1530 | | JUN: 2270U21 sense siNA | AACUGCAUGGACCUAACAUTT | 1944 |
| 2269 | GAACUGCAUGGACCUAACAUUCG | 1531 | 32010 | JUN: 2271U21 sense siNA | ACUGCAUGGACCUAACAUUTT | 1945 |
| 2270 | AACUGCAUGGACCUAACAUUCGA | 1532 | | JUN: 2272U21 sense siNA | CUGCAUGGACCUAACAUUCTT | 1946 |
| 2272 | CUGCAUGGACCUAACAUUCGAUC | 1533 | 32011 | JUN: 2274U21 sense siNA | GCAUGGACCUAACAUUCGATT | 1947 |
| 2274 | GCAUGGACCUAACAUUCGAUCUC | 1534 | | JUN: 2276U21 sense siNA | AUGGACCUAACAUUCGAUCTT | 1948 |
| 703 | AGUGACCGCGACUUUUCAAAGCC | 1507 | | JUN: 723L21 antisense siNA | CUUUGAAAAGUCGCGGUCATT | 1949 |
| | | | | (705C) | | |
| 1486 | CAAACCUCAGCAACUUCAACCCA | 1508 | | JUN: 1506L21 antisense siNA | GGUUGAAGUUGCUGAGGUUTT | 1950 |
| | | | | (1488C) | | |
| 1487 | AAACCUCAGCAACUUCAACCCAG | 1509 | | JUN: 1507L21 antisense siNA | GGGUUGAAGUUGCUGAGGUTT | 1951 |
| | | | | (1489C) | | |
| 1816 | AGGAAAAAGUGAAAACCUUGAAA | 1510 | | JUN: 1836L21 antisense siNA | UCAAGGUUUUCACUUUUUCTT | 1952 |
| | | | | (1818C) | | |
| 1817 | GGAAAAAGUGAAAACCUUGAAAG | 1511 | | JUN: 1837L21 antisense siNA | UUCAAGGUUUUCACUUUUUTT | 1953 |
| | | | | (1819C) | | |
| 1875 | CUCAGGGAACAGGUGGCACAGCU | 1512 | | JUN: 1895L21 antisense siNA | CUGUGCCACCUGUUCCCUGTT | 1954 |
| | | | | (1877C) | | |
| 1901 | ACAGAAAGUCAUGAACCACGUUA | 1513 | | JUN: 1921L21 antisense siNA | ACGUGGUUCAUGACUUUCUTT | 1955 |
| | | | | (1903C) | | |
| 1902 | CAGAAAGUCAUGAACCACGUUAA | 1514 | | JUN: 1922L21 antisense siNA | AACGUGGUUCAUGACUUUCTT | 1956 |
| | | | | (1904C) | | |
| 1904 | GAAAGUCAUGAACCACGUUAACA | 1515 | | JUN: 1924L21 antisense siNA | UUAACGUGGUUCAUGACUUTT | 1957 |
| | | | | (1906C) | | |
| 1907 | AGUCAUGAACCACGUUAACAGUG | 1516 | | JUN: 1927L21 antisense siNA | CUGUUAACGUGGUUCAUGATT | 1958 |
| | | | | (1909C) | | |
| 1924 | ACAGUGGGUGCCAACUCAUGCUA | 1517 | | JUN: 1944L21 antisense siNA | GCAUGAGUUGGCACCCACUTT | 1959 |
| | | | | (1926C) | | |
| 1930 | GGUGCCAACUCAUGCUAACGCAG | 1518 | | JUN: 1950L21 antisense siNA | GCGUUAGCAUGAGUUGGCATT | 1960 |
| | | | | (1932C) | | |
| 1931 | GUGCCAACUCAUGCUAACGCAGC | 1519 | | JUN: 1951L21 antisense siNA | UGCGUUAGCAUGAGUUGGCTT | 1961 |
| | | | | (1933C) | | |
| 1933 | GCCAACUCAUGCUAACGCAGCAG | 1520 | | JUN: 1953L21 antisense siNA | GCUGCGUUAGCAUGAGUUGTT | 1962 |
| | | | | (1935C) | | |
| 1934 | CCAACUCAUGCUAACGCAGCAGU | 1521 | | JUN: 1954L21 antisense siNA | UGCUGCGUUAGCAUGAGUUTT | 1963 |
| | | | | (1936C) | | |
| 1935 | CAACUCAUGCUAACGCAGCAGUU | 1522 | | JUN: 1955L21 antisense siNA | CUGCUGCGUUAGCAUGAGUTT | 1964 |
| | | | | (1937C) | | |
| 2257 | AACAUUGACCAAGAACUGCAUGG | 1523 | | JUN: 2277L21 antisense siNA | AUGCAGUUCUUGGUCAAUGTT | 1965 |
| | | | | (2259C) | | |
| 2258 | ACAUUGACCAAGAACUGCAUGGA | 1524 | | JUN: 2278L21 antisense siNA | CAUGCAGUUCUUGGUCAAUTT | 1966 |
| | | | | (2260C) | | |
| 2259 | CAUUGACCAAGAACUGCAUGGAC | 1525 | | JUN: 2279L21 antisense siNA | CCAUGCAGUUCUUGGUCAATT | 1967 |
| | | | | (2261C) | | |
| 2260 | AUUGACCAAGAACUGCAUGGACC | 1526 | | JUN: 2280L21 antisense siNA | UCCAUGCAGUUCUUGGUCATT | 1968 |
| | | | | (2262C) | | |
| 2262 | UGACCAAGAACUGCAUGGACCUA | 1527 | | JUN: 2282L21 antisense siNA | GGUCCAUGCAGUUCUUGGUTT | 1969 |
| | | | | (2264C) | | |
| 2264 | ACCAAGAACUGCAUGGACCUAAC | 1528 | | JUN: 2284L21 antisense siNA | UAGGUCCAUGCAGUUCUUGTT | 1970 |
| | | | | (2266C) | | |
| 2266 | CAAGAACUGCAUGGACCUAACAU | 1529 | | JUN: 2286L21 antisense siNA | GUUAGGUCCAUGCAGUUCUTT | 1971 |
| | | | | (2268C) | | |
| 2268 | AGAACUGCAUGGACCUAACAUUC | 1530 | | JUN: 2288L21 antisense siNA | AUGUUAGGUCCAUGCAGUUTT | 1972 |
| | | | | (2270C) | | |
| 2269 | GAACUGCAUGGACCUAACAUUCG | 1531 | 32012 | JUN: 2289L21 antisense siNA | AAUGUUAGGUCCAUGCAGUTT | 1973 |
| | | | | (2271C) | | |
| 2270 | AACUGCAUGGACCUAACAUUCGA | 1532 | | JUN: 2290L21 antisense siNA | GAAUGUUAGGUCCAUGCAGTT | 1974 |
| | | | | (2272C) | | |
| 2272 | CUGCAUGGACCUAACAUUCGAUC | 1533 | 32013 | JUN: 2292L21 antisense siNA | UCGAAUGUUAGGUCCAUGCTT | 1975 |
| | | | | (2274C) | | |
| 2274 | GCAUGGACCUAACAUUCGAUCUC | 1534 | | JUN: 2294L21 antisense siNA | GAUCGAAUGUUAGGUCCAUTT | 1976 |
| | | | | (2276C) | | |
| 703 | AGUGACCGCGACUUUUCAAAGCC | 1507 | | JUN: 705U21 sense siNA stab04 | B uGAccGcGAcuuuucAAAGTT B | 1977 |
| 1486 | CAAACCUCAGCAACUUCAACCCA | 1508 | | JUN: 1488U21 sense siNA stab04 | B AAccucAGcAAcuucAAccTT B | 1978 |
| 1487 | AAACCUCAGCAACUUCAACCCAG | 1509 | | JUN: 1489U21 sense siNA stab04 | B AccucAGcAAcuucAAcccTT B | 1979 |
| 1816 | AGGAAAAAGUGAAAACCUUGAAA | 1510 | | JUN: 1818U21 sense siNA stab04 | B GAAAAAGuGAAAAccuuGATT B | 1980 |
| 1817 | GGAAAAAGUGAAAACCUUGAAAG | 1511 | | JUN: 1819U21 sense siNA stab04 | B AAAAAGuGAAAAccuuGAATT B | 1981 |
| 1875 | CUCAGGGAACAGGUGGCACAGCU | 1512 | | JUN: 1877U21 sense siNA stab04 | B cAGGGAAcAGGuGGcAcAGTT B | 1982 |
| 1901 | ACAGAAAGUCAUGAACCACGUUA | 1513 | | JUN: 1903U21 sense siNA stab04 | B AGAAAGucAuGAAccAcGuTT B | 1983 |
| 1902 | CAGAAAGUCAUGAACCACGUUAA | 1514 | | JUN: 1904U21 sense siNA stab04 | B GAAAGucAuGAAccAcGuuTT B | 1984 |
| 1904 | GAAAGUCAUGAACCACGUUAACA | 1515 | | JUN: 1906U21 sense siNA stab04 | B AAGucAuGAAccAcGuuAATT B | 1985 |
| 1907 | AGUCAUGAACCACGUUAACAGUG | 1516 | | JUN: 1909U21 sense siNA stab04 | B ucAuGAAccAcGuuAAcAGTT B | 1986 |
| 1924 | ACAGUGGGUGCCAACUCAUGCUA | 1517 | | JUN: 1926U21 sense siNA stab04 | B AGuGGGuGccAAcucAuGcTT B | 1987 |
| 1930 | GGUGCCAACUCAUGCUAACGCAG | 1518 | | JUN: 1932U21 sense siNA stab04 | B uGccAAcucAuGcuAAcGcTT B | 1988 |
| 1931 | GUGCCAACUCAUGCUAACGCAGC | 1519 | | JUN: 1933U21 sense siNA stab04 | B GccAAcucAuGcuAAcGcATT B | 1989 |
| 1933 | GCCAACUCAUGCUAACGCAGCAG | 1520 | | JUN: 1935U21 sense siNA stab04 | B cAAcucAuGcuAAcGcAGcTT B | 1990 |
| 1934 | CCAACUCAUGCUAACGCAGCAGU | 1521 | | JUN: 1936U21 sense siNA stab04 | B AAcucAuGcuAAcGcAGcATT B | 1991 |
| 1935 | CAACUCAUGCUAACGCAGCAGUU | 1522 | | JUN: 1937U21 sense siNA stab04 | B AcucAuGcuAAcGcAGcAGTT B | 1992 |
| 2257 | AACAUUGACCAAGAACUGCAUGG | 1523 | | JUN: 2259U21 sense siNA stab04 | B cAuuGAccAAGAAcuGcAuTT B | 1993 |
| 2258 | ACAUUGACCAAGAACUGCAUGGA | 1524 | | JUN: 2260U21 sense siNA stab04 | B AuuGAccAAGAAcuGCAuGTT B | 1994 |
| 2259 | CAUUGACCAAGAACUGCAUGGAC | 1525 | | JUN: 2261U21 sense siNA stab04 | B uuGAccAAGAAcuGcAuGGTT B | 1995 |
| 2260 | AUUGACCAAGAACUGCAUGGACC | 1526 | | JUN: 2262U21 sense siNA stab04 | B uGAccAAGAAcuGcAuGGATT B | 1996 |
| 2262 | UGACCAAGAACUGCAUGGACCUA | 1527 | | JUN: 2264U21 sense siNA stab04 | B AccAAGAAcuGcAuGGAccTT B | 1997 |
| 2264 | ACCAAGAACUGCAUGGACCUAAC | 1528 | | JUN: 2266U21 sense siNA stab04 | B cAAGAAcuGcAuGGAccuATT B | 1998 |
| 2266 | CAAGAACUGCAUGGACCUAACAU | 1529 | | JUN: 2268U21 sense siNA stab04 | B AGAAcuGcAuGGAccuAAcTT B | 1999 |
| 2268 | AGAACUGCAUGGACCUAACAUUC | 1530 | | JUN: 2270U21 sense siNA stab04 | B AAcuGcAuGGAccuAAcAuTT B | 2000 |
| 2269 | GAACUGCAUGGACCUAACAUUCG | 1531 | 32014 | JUN: 2271U21 sense siNA stab04 | B AcuGcAuGGAccuAAcAuuTT B | 2001 |
| 2270 | AACUGCAUGGACCUAACAUUCGA | 1532 | | JUN: 2272U21 sense siNA stab04 | B cuGcAuGGAccuAAcAuucTT B | 2002 |
| 2272 | CUGCAUGGACCUAACAUUCGAUC | 1533 | 32015 | JUN: 2274U21 sense siNA stab04 | B GcAuGGAccuAAcAuucGATT B | 2003 |
| 2274 | GCAUGGACCUAACAUUCGAUCUC | 1534 | | JUN: 2276U21 sense siNA stab04 | B AuGGAccuAAcAuucGAucTT B | 2004 |
| 703 | AGUGACCGCGACUUUUCAAAGCC | 1507 | | JUN: 723L21 antisense siNA | cuuuGAAAAGucGcGGucATsT | 2005 |
| | | | | (705C) stab05 | | |
| 1486 | CAAACCUCAGCAACUUCAACCCA | 1508 | | JUN: 1506L21 antisense siNA | GGuuGAAGuuGcuGAGGuuTsT | 2006 |
| | | | | (1488C) stab05 | | |
| 1487 | AAACCUCAGCAACUUCAACCCAG | 1509 | | JUN: 1507L21 antisense siNA | GGGuuGAAGuuGcuGAGGuTsT | 2007 |
| | | | | (1489C) stab05 | | |
| 1816 | AGGAAAAAGUGAAAACCUUGAAA | 1510 | | JUN: 1836L21 antisense siNA | ucAAGGuuuucAcuuuuucTsT | 2008 |
| | | | | (1818C) stab05 | | |
| 1817 | GGAAAAAGUGAAAACCUUGAAAG | 1511 | | JUN: 1837L21 antisense siNA | uucAAGGuuuucAcuuuuuTsT | 2009 |
| | | | | (1819C) stab05 | | |
| 1875 | CUCAGGGAACAGGUGGCACAGCU | 1512 | | JUN: 1895L21 antisense siNA | cuGuGccAccuGuucccuGTsT | 2010 |
| | | | | (1877C) stab05 | | |
| 1901 | ACAGAAAGUCAUGAACCACGUUA | 1513 | | JUN: 1921L21 antisense siNA | AcGuGGuucAuGAcuuucuTsT | 2011 |
| | | | | (1903C) stab05 | | |
| 1902 | CAGAAAGUCAUGAACCACGUUAA | 1514 | | JUN: 1922L21 antisense siNA | AAcGuGGuucAuGAcuuucTsT | 2012 |
| | | | | (1904C) stab05 | | |
| 1904 | GAAAGUCAUGAACCACGUUAACA | 1515 | | JUN: 1924L21 antisense siNA | uuAAcGuGGuucAuGAcuuTsT | 2013 |
| | | | | (1906C) stab05 | | |
| 1907 | AGUCAUGAACCACGUUAACAGUG | 1516 | | JUN: 1927L21 antisense siNA | cuGuuAAcGuGGuucAuGATsT | 2014 |
| | | | | (1909C) stab05 | | |
| 1924 | ACAGUGGGUGCCAACUCAUGCUA | 1517 | | JUN: 1944L21 antisense siNA | GcAuGAGuuGGcAcccAcuTsT | 2015 |
| | | | | (1926C) stab05 | | |
| 1930 | GGUGCCAACUCAUGCUAACGCAG | 1518 | | JUN: 1950L21 antisense siNA | GcGuuAGcAuGAGuuGGcATsT | 2016 |
| | | | | (1932C) stab05 | | |
| 1931 | GUGCCAACUCAUGCUAACGCAGC | 1519 | | JUN: 1951L21 antisense siNA | uGcGuuAGcAuGAGuuGGcTsT | 2017 |
| | | | | (1933C) stab05 | | |
| 1933 | GCCAACUCAUGCUAACGCAGCAG | 1520 | | JUN: 1953L21 antisense siNA | GcuGcGuuAGcAuGAGuuGTsT | 2018 |
| | | | | (1935C) stab05 | | |
| 1934 | CCAACUCAUGCUAACGCAGCAGU | 1521 | | JUN: 1954L21 antisense siNA | uGcuGcGuuAGcAuGAGuuTsT | 2019 |
| | | | | (1936C) stab05 | | |
| 1935 | CAACUCAUGCUAACGCAGCAGUU | 1522 | | JUN: 1955L21 antisense siNA | cuGcuGcGuuAGcAuGAGuTsT | 2020 |
| | | | | (1937C) stab05 | | |
| 2257 | AACAUUGACCAAGAACUGCAUGG | 1523 | | JUN: 2277L21 antisense siNA | AuGcAGuucuuGGucAAuGTsT | 2021 |
| | | | | (2259C) stab05 | | |
| 2258 | ACAUUGACCAAGAACUGCAUGGA | 1524 | | JUN: 2278L21 antisense siNA | cAuGcAGuucuuGGucAAuTsT | 2022 |
| | | | | (2260C) stab05 | | |
| 2259 | CAUUGACCAAGAACUGCAUGGAC | 1525 | | JUN: 2279L21 antisense siNA | ccAuGcAGuucuuGGucAATsT | 2023 |
| | | | | (2261C) stab05 | | |
| 2260 | AUUGACCAAGAACUGCAUGGACC | 1526 | | JUN: 2280L21 antisense siNA | uccAuGcAGuucuuGGucATsT | 2024 |
| | | | | (2262C) stab05 | | |
| 2262 | UGACCAAGAACUGCAUGGACCUA | 1527 | | JUN: 2282L21 antisense siNA | GGuccAuGcAGuucuuGGuTsT | 2025 |
| | | | | (2264C) stab05 | | |
| 2264 | ACCAAGAACUGCAUGGACCUAAC | 1528 | | JUN: 2284L21 antisense siNA | uAGGuccAuGcAGuucuuGTsT | 2026 |
| | | | | (2266C) stab05 | | |
| 2266 | CAAGAACUGCAUGGACCUAACAU | 1529 | | JUN: 2286L21 antisense siNA | GuuAGGuccAuGcAGuucuTsT | 2027 |
| | | | | (2268C) stab05 | | |
| 2268 | AGAACUGCAUGGACCUAACAUUC | 1530 | | JUN: 2288L21 antisense siNA | AuGuuAGGuccAuGcAGuuTsT | 2028 |
| | | | | (2270C) stab05 | | |
| 2269 | GAACUGCAUGGACCUAACAUUCG | 1531 | 32016 | JUN: 2289L21 antisense siNA | AAuGuuAGGuccAuGcAGuTsT | 2029 |
| | | | | (2271C) stab05 | | |
| 2270 | AACUGCAUGGACCUAACAUUCGA | 1532 | | JUN: 2290L21 antisense siNA | GAAuGuuAGGuccAuGcAGTsT | 2030 |
| | | | | (2272C) stab05 | | |
| 2272 | CUGCAUGGACCUAACAUUCGAUC | 1533 | 32017 | JUN: 2292L21 antisense siNA | ucGAAuGuuAGGuccAuGcTsT | 2031 |
| | | | | (2274C) stab05 | | |
| 2274 | GCAUGGACCUAACAUUCGAUCUC | 1534 | | JUN: 2294L21 antisense siNA | GAucGAAuGuuAGGuccAuTsT | 2032 |
| | | | | (2276C) stab05 | | |
| 703 | AGUGACCGCGACUUUUCAAAGCC | 1507 | 32085 | JUN: 705U21 sense siNA | B uGAccGcGAcuuuucAAAGTT B | 2033 |
| | | | | stab07 | | |
| 1486 | CAAACCUCAGCAACUUCAACCCA | 1508 | 32086 | JUN: 1488U21 sense siNA | B AAccucAGcAAcuucAAccTT B | 2034 |
| | | | | stab07 | | |
| 1487 | AAACCUCAGCAACUUCAACCCAG | 1509 | 32087 | JUN: 1489U21 sense siNA | B AccucAGcAAcuucAAcccTT B | 2035 |
| | | | | stab07 | | |
| 1816 | AGGAAAAAGUGAAAACCUUGAAA | 1510 | 32088 | JUN: 1818U21 sense siNA | B GAAAAAGuGAAAAccuuGATT B | 2036 |
| | | | | stab07 | | |
| 1817 | GGAAAAAGUGAAAACCUUGAAAG | 1511 | 31818 | JUN: 1819U21 sense siNA | B AAAAAGuGAAAAccuuGAATT B | 2037 |
| | | | | stab07 | | |
| 1875 | CUCAGGGAACAGGUGGCACAGCU | 1512 | 32089 | JUN: 1877U21 sense siNA | B cAGGGAAcAGGuGGcAcAGTT B | 2038 |
| | | | | stab07 | | |
| 1901 | ACAGAAAGUCAUGAACCACGUUA | 1513 | 32090 | JUN: 1903U21 sense siNA | B AGAAAGucAuGAAccAcGuTT B | 2039 |
| | | | | stab07 | | |
| 1902 | CAGAAAGUCAUGAACCACGUUAA | 1514 | 32091 | JUN: 1904U21 sense siNA | B GAAAGucAuGAAccAcGuuTT B | 2040 |
| | | | | stab07 | | |
| 1904 | GAAAGUCAUGAACCACGUUAACA | 1515 | 32092 | JUN: 1906U21 sense siNA | B AAGucAuGAAccAcGuuAATT B | 2041 |
| | | | | stab07 | | |
| 1907 | AGUCAUGAACCACGUUAACAGUG | 1516 | 32093 | JUN: 1909U21 sense siNA | B ucAuGAAccAcGuuAAcAGTT B | 2042 |
| | | | | stab07 | | |
| 1924 | ACAGUGGGUGCCAACUCAUGCUA | 1517 | 32094 | JUN: 1926U21 sense siNA | B AGuGGGuGccAAcucAuGcTT B | 2043 |
| | | | | stab07 | | |
| 1930 | GGUGCCAACUCAUGCUAACGCAG | 1518 | 32095 | JUN: 1932U21 sense siNA | B uGccAAcucAuGcuAAcGcTT B | 2044 |
| | | | | stab07 | | |
| 1931 | GUGCCAACUCAUGCUAACGCAGC | 1519 | 32096 | JUN: 1933U21 sense siNA | B GccAAcucAuGcuAAcGcATT B | 2045 |
| | | | | stab07 | | |
| 1933 | GCCAACUCAUGCUAACGCAGCAG | 1520 | 32097 | JUN: 1935U21 sense siNA | B cAAcucAuGcuAAcGcAGcTT B | 2046 |
| | | | | stab07 | | |
| 1934 | CCAACUCAUGCUAACGCAGCAGU | 1521 | 32098 | JUN: 1936U21 sense siNA | B AAcucAuGcuAAcGcAGcATT B | 2047 |
| | | | | stab07 | | |
| 1935 | CAACUCAUGCUAACGCAGCAGUU | 1522 | 31819 | JUN: 1937U21 sense siNA | B AcucAuGcuAAcGcAGcAGTT B | 2048 |
| | | | | stab07 | | |
| 2257 | AACAUUGACCAAGAACUGCAUGG | 1523 | 32099 | JUN: 2259U21 sense siNA | B cAuuGAccAAGAAcuGcAuTT B | 2049 |
| | | | | stab07 | | |
| 2258 | ACAUUGACCAAGAACUGCAUGGA | 1524 | 32100 | JUN: 2260U21 sense siNA | B AuuGAccAAGAAcuGcAuGTT B | 2050 |
| | | | | stab07 | | |
| 2259 | CAUUGACCAAGAACUGCAUGGAC | 1525 | 31820 | JUN: 2261U21 sense siNA | B uuGAccAAGAAcuGcAuGGTT B | 2051 |
| | | | | stab07 | | |
| 2260 | AUUGACCAAGAACUGCAUGGACC | 1526 | 32101 | JUN: 2262U21 sense siNA | B uGAccAAGAAcuGcAuGGATT B | 2052 |
| | | | | stab07 | | |
| 2262 | UGACCAAGAACUGCAUGGACCUA | 1527 | 32102 | JUN: 2264U21 sense siNA | B AccAAGAAcuGcAuGGAccTT B | 2053 |
| | | | | stab07 | | |
| 2264 | ACCAAGAACUGCAUGGACCUAAC | 1528 | 31821 | JUN: 2266U21 sense siNA | B cAAGAAcuGcAuGGAccuATT B | 2054 |
| | | | | stab07 | | |
| 2266 | CAAGAACUGCAUGGACCUAACAU | 1529 | 32103 | JUN: 2268U21 sense siNA | B AGAAcuGcAuGGAccuAAcTT B | 2055 |
| | | | | stab07 | | |
| 2268 | AGAACUGCAUGGACCUAACAUUC | 1530 | 32104 | JUN: 2270U21 sense siNA | B AAcuGcAuGGAccuAAcAuTT B | 2056 |
| | | | | stab07 | | |
| 2269 | GAACUGCAUGGACCUAACAUUCG | 1531 | 31822 | JUN: 2271U21 sense siNA | B AcuGcAuGGAccuAAcAuuTT B | 2057 |
| | | | | stab07 | | |
| 2270 | AACUGCAUGGACCUAACAUUCGA | 1532 | 31823 | JUN: 2272U21 sense siNA | B cuGcAuGGAccuAAcAuucTT B | 2058 |
| | | | | stab07 | | |
| 2272 | CUGCAUGGACCUAACAUUCGAUC | 1533 | 31824 | JUN: 2274U21 sense siNA | B GcAuGGAccuAAcAuucGATT B | 2059 |
| | | | | stab07 | | |
| 2274 | GCAUGGACCUAACAUUCGAUCUC | 1534 | 31825 | JUN: 2276U21 sense siNA | B AuGGAccuAAcAuucGAucTT B | 2060 |
| | | | | stab07 | | |
| 703 | AGUGACCGCGACUUUUCAAAGCC | 1507 | | JUN: 723L21 antisense siNA | cuuuGAAAAGucGcGGucATsT | 2061 |
| | | | | (705C) stab11 | | |
| 1486 | CAAACCUCAGCAACUUCAACCCA | 1508 | | JUN: 1506L21 antisense siNA | GGuuGAAGuuGcuGAGGuuTsT | 2062 |
| | | | | (1488C) stab11 | | |
| 1487 | AAACCUCAGCAACUUCAACCCAG | 1509 | | JUN: 1507L21 antisense siNA | GGGuuGAAGuuGCuGAGGuTsT | 2063 |
| | | | | (1489C) stab11 | | |
| 1816 | AGGAAAAAGUGAAAACCUUGAAA | 1510 | | JUN: 1836L21 antisense siNA | ucAAGGuuuucAcuuuuucTsT | 2064 |
| | | | | (1818C) stab11 | | |
| 1817 | GGAAAAAGUGAAAACCUUGAAAG | 1511 | | JUN: 1837L21 antisense siNA | uucAAGGuuuucAcuuuuuTsT | 2065 |
| | | | | (1819C) stab11 | | |
| 1875 | CUCAGGGAACAGGUGGCACAGCU | 1512 | | JUN: 1895L21 antisense siNA | cuGuGccAccuGuucccuGTsT | 2066 |
| | | | | (1877C) stab11 | | |
| 1901 | ACAGAAAGUCAUGAACCACGUUA | 1513 | | JUN: 1921L21 antisense siNA | AcGuGGuucAuGAcuuucuTsT | 2067 |
| | | | | (1903C) stab11 | | |
| 1902 | CAGAAAGUCAUGAACCACGUUAA | 1514 | | JUN: 1922L21 antisense siNA | AAcGuGGuucAuGAcuuucTsT | 2068 |
| | | | | (1904C) stab11 | | |
| 1904 | GAAAGUCAUGAACCACGUUAACA | 1515 | | JUN: 1924L21 antisense siNA | uuAAcGuGGuucAuGAcuuTsT | 2069 |
| | | | | (1906C) stab11 | | |
| 1907 | AGUCAUGAACCACGUUAACAGUG | 1516 | | JUN: 1927L21 antisense siNA | cuGuuAAcGuGGuucAuGATsT | 2070 |
| | | | | (1909C) stab11 | | |
| 1924 | ACAGUGGGUGCCAACUCAUGCUA | 1517 | | JUN: 1944L21 antisense siNA | GcAuGAGuuGGcAcccAcuTsT | 2071 |
| | | | | (1926C) stab11 | | |
| 1930 | GGUGCCAACUCAUGCUAACGCAG | 1518 | | JUN: 1950L21 antisense siNA | GcGuuAGcAuGAGuuGGcATsT | 2072 |
| | | | | (1932C) stab11 | | |
| 1931 | GUGCCAACUCAUGCUAACGCAGC | 1519 | | JUN: 1951L21 antisense siNA | uGcGuuAGcAuGAGuuGGcTsT | 2073 |
| | | | | (1933C) stab11 | | |
| 1933 | GCCAACUCAUGCUAACGCAGCAG | 1520 | | JUN: 1953L21 antisense siNA | GcuGcGuuAGcAuGAGuuGTsT | 2074 |
| | | | | (1935C) stab11 | | |
| 1934 | CCAACUCAUGCUAACGCAGCAGU | 1521 | | JUN: 1954L21 antisense siNA | uGcuGcGuuAGcAuGAGuuTsT | 2075 |
| | | | | (1936C) stab11 | | |
| 1935 | CAACUCAUGCUAACGCAGCAGUU | 1522 | | JUN: 1955L21 antisense siNA | cuGcuGcGuuAGcAuGAGuTsT | 2076 |
| | | | | (1937C) stab11 | | |
| 2257 | AACAUUGACCAAGAACUGCAUGG | 1523 | | JUN: 2277L21 antisense siNA | AuGcAGuucuuGGucAAuGTsT | 2077 |
| | | | | (2259C) stab11 | | |
| 2258 | ACAUUGACCAAGAACUGCAUGGA | 1524 | | JUN: 2278L21 antisense siNA | cAuGcAGuucuuGGucAAuTsT | 2078 |
| | | | | (2260C) stab11 | | |
| 2259 | CAUUGACCAAGAACUGCAUGGAC | 1525 | | JUN: 2279L21 antisense siNA | ccAuGcAGuucuuGGucAATsT | 2079 |
| | | | | (2261C) stab11 | | |
| 2260 | AUUGACCAAGAACUGCAUGGACC | 1526 | | JUN: 2280L21 antisense siNA | uccAuGcAGuucuuGGucATsT | 2080 |
| | | | | (2262C) stab11 | | |
| 2262 | UGACCAAGAACUGCAUGGACCUA | 1527 | | JUN: 2282L21 antisense siNA | GGuccAuGcAGuucuuGGuTsT | 2081 |
| | | | | (2264C) stab11 | | |
| 2264 | ACCAAGAACUGCAUGGACCUAAC | 1528 | | JUN: 2284L21 antisense siNA | uAGGuccAuGcAGuucuuGTsT | 2082 |
| | | | | (2266C) stab11 | | |
| 2266 | CAAGAACUGCAUGGACCUAACAU | 1529 | | JUN: 2286L21 antisense siNA | GuuAGGuccAuGcAGuucuTsT | 2083 |
| | | | | (2268C) stab11 | | |
| 2268 | AGAACUGCAUGGACCUAACAUUC | 1530 | | JUN: 2288L21 antisense siNA | AuGuuAGGuccAuGcAGuuTsT | 2084 |
| | | | | (2270C) stab11 | | |
| 2269 | GAACUGCAUGGACCUAACAUUCG | 1531 | | JUN: 2289L21 antisense siNA | AAuGuuAGGuccAuGcAGuTsT | 2085 |
| | | | | (2271C) stab11 | | |
| 2270 | AACUGCAUGGACCUAACAUUCGA | 1532 | | JUN: 2290L21 antisense siNA | GAAuGuuAGGuccAuGcAGTsT | 2086 |
| | | | | (2272C) stab11 | | |
| 2272 | CUGCAUGGACCUAACAUUCGAUC | 1533 | | JUN: 2292L21 antisense siNA | ucGAAuGuuAGGuccAuGcTsT | 2087 |
| | | | | (2274C) stab11 | | |
| 2274 | GCAUGGACCUAACAUUCGAUCUC | 1534 | | JUN: 2294L21 antisense siNA | GAucGAAuGuuAGGuccAuTsT | 2088 |
| | | | | (2276C) stab11 | | |
| 703 | AGUGACCGCGACUUUUCAAAGCC | 1507 | | JUN: 705U21 sense siNA | B uGAccGcGAcuuuucAAAGTT B | 2089 |
| | | | | stab18 | | |
| 1486 | CAAACCUCAGCAACUUCAACCCA | 1508 | | JUN: 1488U21 sense siNA | B AAccucAGcAAcuucAAccTT B | 2090 |
| | | | | stab18 | | |
| 1487 | AAACCUCAGCAACUUCAACCCAG | 1509 | | JUN: 1489U21 sense siNA | B AccucAGcAAcuucAAcccTT B | 2091 |
| | | | | stab18 | | |
| 1816 | AGGAAAAAGUGAAAACCUUGAAA | 1510 | | JUN: 1818U21 sense siNA | B GAAAAAGuGAAAAccuuGATT B | 2092 |
| | | | | stab18 | | |
| 1817 | GGAAAAAGUGAAAACCUUGAAAG | 1511 | | JUN: 1819U21 sense siNA | B AAAAAGuGAAAAccuuGAATT B | 2093 |
| | | | | stab18 | | |
| 1875 | CUCAGGGAACAGGUGGCACAGCU | 1512 | | JUN: 1877U21 sense siNA | B cAGGGAAcAGGuGGcAcAGTT B | 2094 |
| | | | | stab18 | | |
| 1901 | ACAGAAAGUCAUGAACCACGUUA | 1513 | | JUN: 1903U21 sense siNA | B AGAAAGucAuGAAcCAcGuTT B | 2095 |
| | | | | stab18 | | |
| 1902 | CAGAAAGUCAUGAACCACGUUAA | 1514 | | JUN: 1904U21 sense siNA | B GAAAGucAuGAAcCAcGuuTT B | 2096 |
| | | | | stab18 | | |
| 1904 | GAAAGUCAUGAACCACGUUAACA | 1515 | | JUN: 1906U21 sense siNA | B AAGucAuGAAccAcGuuAATT B | 2097 |
| | | | | stab18 | | |
| 1907 | AGuCAUGAACCACGUUAACAGUG | 1516 | | JUN: 1909U21 sense siNA | B ucAuGAAccAcGuuAAcAGTT B | 2098 |
| | | | | stab18 | | |
| 1924 | ACAGUGGGUGCCAACUCAUGCUA | 1517 | | JUN: 1926U21 sense siNA | B AGuGGGuGCcAAcucAuGcTT B | 2099 |
| | | | | stab18 | | |
| 1930 | GGUGCCAACUCAUGCUAACGCAG | 1518 | | JUN: 1932U21 sense siNA | B uGccAAcucAuGcuAAcGcTT B | 2100 |
| | | | | stab18 | | |
| 1931 | GUGCCAACUCAUGCUAACGCAGC | 1519 | | JUN: 1933U21 sense siNA | B GccAAcucAuGcuAAcGcATT B | 2101 |
| | | | | stab18 | | |
| 1933 | GCCAACUCAUGCUAACGCAGCAG | 1520 | | JUN: 1935U21 sense siNA | B cAAcucAuGcuAAcGcAGcTT B | 2102 |
| | | | | stab18 | | |
| 1934 | CCAACUCAUGCUAACGCAGCAGU | 1521 | | JUN: 1936U21 sense siNA | B AAcucAuGcuAAcGcAGcATT B | 2103 |
| | | | | stab18 | | |
| 1935 | CAACUCAUGCUAACGCAGCAGUU | 1522 | | JUN: 1937U21 sense siNA | B AcucAuGcuAAcGcAGcAGTT B | 2104 |
| | | | | stab18 | | |
| 2257 | AACAUUGACCAAGAACUGCAUGG | 1523 | | JUN: 2259U21 sense siNA | B cAuuGAccAAGAAcuGcAuTT B | 2105 |
| | | | | stab18 | | |
| 2258 | ACAUUGACCAAGAACUGCAUGGA | 1524 | | JUN: 2260U21 sense siNA | B AuuGAccAAGAAcuGcAuGTT B | 2106 |
| | | | | stab18 | | |
| 2259 | CAUUGACCAAGAACUGCAUGGAC | 1525 | | JUN: 2261U21 sense siNA | B uuGAccAAGAAcuGcAuGGTT B | 2107 |
| | | | | stab18 | | |
| 2260 | AUUGACCAAGAACUGCAUGGACC | 1526 | | JUN: 2262U21 sense siNA | B uGAccAAGAAcuGcAuGGATT B | 2108 |
| | | | | stab18 | | |
| 2262 | UGACCAAGAACUGCAUGGACCUA | 1527 | | JUN: 2264U21 sense siNA | B AccAAGAAcuGcAuGGAccTT B | 2109 |
| | | | | stab18 | | |
| 2264 | ACCAAGAACUGCAUGGACCUAAC | 1528 | | JUN: 2266U21 sense siNA | B cAAGAAcuGcAuGGAccuATT B | 2110 |
| | | | | stab18 | | |
| 2266 | CAAGAACUGCAUGGACCUAACAU | 1529 | | JUN: 2268U21 sense siNA | B AGAAcuGcAuGGAccuAAcTT B | 2111 |
| | | | | stab18 | | |
| 2268 | AGAACUGCAUGGACCUAACAUUC | 1530 | | JUN: 2270U21 sense siNA | B AAcuGcAuGGAccuAAcAuTT B | 2112 |
| | | | | stab18 | | |
| 2269 | GAACUGCAUGGACCUAACAUUCG | 1531 | 32081 | JUN: 2271U21 sense siNA | B AcuGcAuGGAccuAAcAuuTT B | 2113 |
| | | | | stab18 | | |
| 2270 | AACUGCAUGGACCUAACAUUCGA | 1532 | | JUN: 2272U21 sense siNA | B cuGcAuGGAccuAAcAuucTT B | 2114 |
| | | | | stab18 | | |
| 2272 | CUGCAUGGACCUAACAUUCGAUC | 1533 | 32082 | JUN: 2274U21 sense siNA | B GcAuGGAccuAAcAuucGATT B | 2115 |
| | | | | stab18 | | |
| 2274 | GCAUGGACCUAACAUUCGAUCUC | 1534 | | JUN: 2276U21 sense siNA | B AuGGAccuAAcAuucGAucTT B | 2116 |
| | | | | stab18 | | |
| 703 | AGUGACCGCGACUUUUCAAAGCC | 1507 | 32105 | JUN: 723L21 antisense siNA | cuuuGAAAAGucGcGGucATsT | 2117 |
| | | | | (705C) stab08 | | |
| 1486 | CAAACCUCAGCAACUUCAACCCA | 1508 | 32106 | JUN: 1506L21 antisense siNA | GGuuGAAGuuGcuGAGGuuTsT | 2118 |
| | | | | (1488C) stab08 | | |
| 1487 | AAACCUCAGCAACUUCAACCCAG | 1509 | 32107 | JUN: 1507L21 antisense siNA | GGGuuGAAGuuGcuGAGGuTsT | 2119 |
| | | | | (1489C) stab08 | | |
| 1816 | AGGAAAAAGUGAAAACCUUGAAA | 1510 | 32108 | JUN: 1836L21 antisense siNA | ucAAGGuuuucAcuuuuucTsT | 2120 |
| | | | | (1818C) stab08 | | |
| 1817 | GGAAAAAGUGAAAACCUUGAAAG | 1511 | 31826 | JUN: 1837L21 antisense siNA | uucAAGGuuuucAcuuuuuTsT | 2121 |
| | | | | (1819C) stab08 | | |
| 1875 | CUCAGGGAACAGGUGGCACAGCU | 1512 | 32109 | JUN: 1895L21 antisense siNA | cuGuGccAccuGuucccuGTsT | 2122 |
| | | | | (1877C) stab08 | | |
| 1901 | ACAGAAAGUCAUGAACCACGUUA | 1513 | 32110 | JUN: 1921L21 antisense siNA | AcGuGGuucAuGAcuuucuTsT | 2123 |
| | | | | (1903C) stab08 | | |
| 1902 | CAGAAAGUCAUGAACCACGUUAA | 1514 | 32111 | JUN: 1922L21 antisense siNA | AAcGuGGuucAuGAcuuucTsT | 2124 |
| | | | | (1904C) stab08 | | |
| 1904 | GAAAGUCAUGAACCACGUUAACA | 1515 | 32112 | JUN: 1924L21 antisense siNA | uuAAcGuGGuucAuGAcuuTsT | 2125 |
| | | | | (1906C) stab08 | | |
| 1907 | AGUCAUGAACCACGUUAACAGUG | 1516 | 32113 | JUN: 1927L21 antisense siNA | cuGuuAAcGuGGuucAuGATsT | 2126 |
| | | | | (1909C) stab08 | | |
| 1924 | ACAGUGGGUGCCAACUCAUGCUA | 1517 | 32114 | JUN: 1944L21 antisense siNA | GcAuGAGuuGGcAcccAcuTsT | 2127 |
| | | | | (1926C) stab08 | | |
| 1930 | GGUGCCAACUCAUGCUAACGCAG | 1518 | 32115 | JUN: 1950L21 antisense siNA | GcGuuAGcAuGAGuuGGcATsT | 2128 |
| | | | | (1932C) stab08 | | |
| 1931 | GUGCCAACUCAUGCUAACGCAGC | 1519 | 32116 | JUN: 1951L21 antisense siNA | uGcGuuAGcAuGAGuuGGcTsT | 2129 |
| | | | | (1933C) stab08 | | |
| 1933 | GCCAACUCAUGCUAACGCAGCAG | 1520 | 32117 | JUN: 1953L21 antisense siNA | GcuGcGuuAGcAuGAGuuGTsT | 2130 |
| | | | | (1935C) stab08 | | |
| 1934 | CCAACUCAUGCUAACGCAGCAGU | 1521 | 32118 | JUN: 1954L21 antisense siNA | uGcuGcGuuAGcAuGAGuuTsT | 2131 |
| | | | | (1936C) stab08 | | |
| 1935 | CAACUCAUGCUAACGCAGCAGUU | 1522 | 31827 | JUN: 1955L21 antisense siNA | cuGcuGcGuuAGcAuGAGuTsT | 2132 |
| | | | | (1937C) stab08 | | |
| 2257 | AACAUUGACCAAGAACUGCAUGG | 1523 | 32119 | JUN: 2277L21 antisense siNA | AuGcAGuucuuGGucAAuGTsT | 2133 |
| | | | | (2259C) stab08 | | |
| 2258 | ACAUUGACCAAGAACUGCAUGGA | 1524 | 32120 | JUN: 2278L21 antisense siNA | cAuGcAGuucuuGGucAAuTsT | 2134 |
| | | | | (2260C) stab08 | | |
| 2259 | CAUUGACCAAGAACUGCAUGGAC | 1525 | 31828 | JUN: 2279L21 antisense siNA | ccAuGcAGuucuuGGucAATsT | 2135 |
| | | | | (2261C) stab08 | | |
| 2260 | AUUGACCAAGAACUGCAUGGACC | 1526 | 32121 | JUN: 2280L21 antisense siNA | uccAuGcAGuucuuGGucATsT | 2136 |
| | | | | (2262C) stab08 | | |
| 2262 | UGACCAAGAACUGCAUGGACCUA | 1527 | 32122 | JUN: 2282L21 antisense siNA | GGuccA+E uGcAGuucuuGGuTsT | 2137 |
| | | | | (2264C) stab08 | | |
| 2264 | ACCAAGAACUGCAUGGACCUAAC | 1528 | 31829 | JUN: 2284L21 antisense siNA | uAGGuccAuGcAGuucuuGTsT | 2138 |
| | | | | (2266C) stab08 | | |
| 2266 | CAAGAACUGCAUGGACCUAACAU | 1529 | 32123 | JUN: 2286L21 antisense siNA | GuuAGGuccAuGcAGuucuTsT | 2139 |
| | | | | (2268C) stab08 | | |
| 2268 | AGAACUGCAUGGACCUAACAUUC | 1530 | 32124 | JUN: 2288L21 antisense siNA | AuGuuAGGuccAuGcAGuuTsT | 2140 |
| | | | | (2270C) stab08 | | |
| 2269 | GAACUGCAUGGACCUAACAUUCG | 1531 | 31830 | JUN: 2289L21 antisense siNA | AAuGuuAGGuccAuGcAGuTsT | 2141 |
| | | | | (2271C) stab08 | | |
| 2270 | AACUGCAUGGACCUAACAUUCGA | 1532 | 31831 | JUN: 2290L21 antisense siNA | GAAuGuuAGGuccAuGcAGTsT | 2142 |
| | | | | (2272C) stab08 | | |
| 2272 | CUGCAUGGACCUAACAUUCGAUC | 1533 | 31832 | JUN: 2292L21 antisense siNA | ucGAAuGuuAGGuccAuGcTsT | 2143 |
| | | | | (2274C) stab08 | | |
| 2274 | GCAUGGACCUAACAUUCGAUCUC | 1534 | 31833 | JUN: 2294L21 antisense siNA | GAucGAAuGuuAGGuccAuTsT | 2144 |
| | | | | (2276C) stab08 | | |
| 703 | AGUGACCGCGACUUUUCAAAGCC | 1507 | | JUN: 705U21 sense siNA | B UGACCGCGACUUUUCAAAGTT B | 2145 |
| | | | | stab09 | | |
| 1486 | CAAACCUCAGCAACUUCAACCCA | 1508 | | JUN: 1488U21 sense siNA | B AACCUCAGCAACUUCAACCTT B | 2146 |
| | | | | stab09 | | |
| 1487 | AAACCUCAGCAACUUCAACCCAG | 1509 | | JUN: 1489U21 sense siNA | B ACCUCAGCAACUUCAACCCTT B | 2147 |
| | | | | stab09 | | |
| 1816 | AGGAAAAAGUGAAAACCUUGAAA | 1510 | | JUN: 1818U21 sense siNA | B GAAAAAGUGAAAACCUUGATT B | 2148 |
| | | | | stab09 | | |
| 1817 | GGAAAAAGUGAAAACCUUGAAAG | 1511 | | JUN: 1819U21 sense siNA | B AAAAAGUGAAAACCUUGAATT B | 2149 |
| | | | | stab09 | | |
| 1875 | CUCAGGGAACAGGUGGCACAGCU | 1512 | | JUN: 1877U21 sense siNA | B CAGGGAACAGGUGGCACAGTT B | 2150 |
| | | | | stab09 | | |
| 1901 | ACAGAAAGUCAUGAACCACGUUA | 1513 | 32330 | JUN: 1903U21 sense siNA | B AGAAAGUCAUGAACCACGUTT B | 2151 |
| | | | | stab09 | | |
| 1902 | CAGAAAGUCAUGAACCACGUUAA | 1514 | | JUN: 1904U21 sense siNA | B GAAAGUCAUGAACCACGUUTT B | 2152 |
| | | | | stab09 | | |
| 1904 | GAAAGUCAUGAACCACGUUAACA | 1515 | 32331 | JUN: 1906U21 sense siNA | B AAGUCAUGAACCACGUUAATT B | 2153 |
| | | | | stab09 | | |
| 1907 | AGUCAUGAACCACGUUAACAGUG | 1516 | | JUN: 1909U21 sense siNA | B UCAUGAACCACGUUAACAGTT B | 2154 |
| | | | | stab09 | | |
| 1924 | ACAGUGGGUGCCAACUCAUGCUA | 1517 | | JUN: 1926U21 sense siNA | B AGUGGGUGCCAACUCAUGCTT B | 2155 |
| | | | | stab09 | | |
| 1930 | GGUGCCAACUCAUGCUAACGCAG | 1518 | | JUN: 1932U21 sense siNA | B UGCCAACUCAUGCUAACGCTT B | 2156 |
| | | | | stab09 | | |
| 1931 | GUGCCAACUCAUGCUAACGCAGC | 1519 | | JUN: 1933U21 sense siNA | B GCCAACUCAUGCUAACGCATT B | 2157 |
| | | | | stab09 | | |
| 1933 | GCCAACUCAUGCUAACGCAGCAG | 1520 | | JUN: 1935U21 sense siNA | B CAACUCAUGCUAACGCAGCTT B | 2158 |
| | | | | stab09 | | |
| 1934 | CCAACUCAUGCUAACGCAGCAGU | 1521 | | JUN: 1936U21 sense siNA | B AACUCAUGCUAACGCAGCATT B | 2159 |
| | | | | stab09 | | |
| 1935 | CAACUCAUGCUAACGCAGCAGUU | 1522 | | JUN: 1937U21 sense siNA | B ACUCAUGCUAACGCAGCAGTT B | 2160 |
| | | | | stab09 | | |
| 2257 | AACAUUGACCAAGAACUGCAUGG | 1523 | | JUN: 2259U21 sense siNA | B CAUUGACCAAGAACUGCAUTT B | 2161 |
| | | | | stab09 | | |
| 2258 | ACAUUGACCAAGAACUGCAUGGA | 1524 | | JUN: 2260U21 sense siNA | B AUUGACCAAGAACUGCAUGTT B | 2162 |
| | | | | stab09 | | |
| 2259 | CAUUGACCAAGAACUGCAUGGAC | 1525 | | JUN: 2261U21 sense siNA | B UUGACCAAGAACUGCAUGGTT B | 2163 |
| | | | | stab09 | | |
| 2260 | AUUGACCAAGAACUGCAUGGACC | 1526 | | JUN: 2262U21 sense siNA | B UGACCAAGAACUGCAUGGATT B | 2164 |
| | | | | stab09 | | |
| 2262 | UGACCAAGAACUGCAUGGACCUA | 1527 | | JUN: 2264U21 sense siNA | B ACCAAGAACUGCAUGGACCTT B | 2165 |
| | | | | stab09 | | |
| 2264 | ACCAAGAACUGCAUGGACCUAAC | 1528 | | JUN: 2266U21 sense siNA | B CAAGAACUGCAUGGACCUATT B | 2166 |
| | | | | stab09 | | |
| 2266 | CAAGAACUGCAUGGACCUAACAU | 1529 | | JUN: 2268U21 sense siNA | B AGAACUGCAUGGACCUAACTT B | 2167 |
| | | | | stab09 | | |
| 2268 | AGAACUGCAUGGACCUAACAUUC | 1530 | | JUN: 2270U21 sense siNA | B AACUGCAUGGACCUAACAUTT B | 2168 |
| | | | | stab09 | | |
| 2269 | GAACUGCAUGGACCUAACAUUCG | 1531 | 32020 | JUN: 2271U21 sense siNA | B ACUGCAUGGACCUAACAUUTT B | 2169 |
| | | | | stab09 | | |
| 2270 | AACUGCAUGGACCUAACAUUCGA | 1532 | | JUN: 2272U21 sense siNA | B CUGCAUGGACCUAACAUUCTT B | 2170 |
| | | | | stab09 | | |
| 2272 | CUGCAUGGACCUAACAUUCGAUC | 1533 | 32021 | JUN: 2274U21 sense siNA | B GCAUGGACCUAACAUUCGATT B | 2171 |
| | | | | stab09 | | |
| 2274 | GCAUGGACCUAACAUUCGAUCUC | 1534 | | JUN: 2276U21 sense siNA | B AUGGACCUAACAUUCGAUCTT B | 2172 |
| | | | | stab09 | | |
| 703 | AGUGACCGCGACUUUUCAAAGCC | 1507 | | JUN: 723L21 antisense siNA | CUUUGAAAAGUCGCGGUCATsT | 2173 |
| | | | | (705C) stab10 | | |
| 1486 | CAAACCUCAGCAACUUCAACCCA | 1508 | | JUN: 1506L21 antisense siNA | GGUUGAAGUUGCUGAGGUUTsT | 2174 |
| | | | | (1488C) stab10 | | |
| 1487 | AAACCUCAGCAACUUCAACCCAG | 1509 | | JUN: 1507L21 antisense siNA | GGGUUGAAGUUGCUGAGGUTsT | 2175 |
| | | | | (1489C) stab10 | | |
| 1816 | AGGAAAAAGUGAAAACCUUGAAA | 1510 | | JUN: 1836L21 antisense siNA | UCAAGGUUUUCACUUUUUCTsT | 2176 |
| | | | | (1818C) stab10 | | |
| 1817 | GGAAAAAGUGAAAACCUUGAAAG | 1511 | | JUN: 1837L21 antisense siNA | UUCAAGGUUUUCACUUUUUTsT | 2177 |
| | | | | (1819C) stab10 | | |
| 1875 | CUCAGGGAACAGGUGGCACAGCU | 1512 | | JUN: 1895L21 antisense siNA | CUGUGCCACCUGUUCCCUGTsT | 2178 |
| | | | | (1877C) stab10 | | |
| 1901 | ACAGAAAGUCAUGAACCACGUUA | 1513 | 32332 | JUN: 1921L21 antisense siNA | ACGUGGUUCAUGACUUUCUTsT | 2179 |
| | | | | (1903C) stab10 | | |
| 1902 | CAGAAAGUCAUGAACCACGUUAA | 1514 | | JUN: 1922L21 antisense siNA | AACGUGGUUCAUGACUUUCTsT | 2180 |
| | | | | (1904C) stab10 | | |
| 1904 | GAAAGUCAUGAACCACGUUAACA | 1515 | 32333 | JUN: 1924L21 antisense siNA | UUAACGUGGUUCAUGACUUTsT | 2181 |
| | | | | (1906C) stab10 | | |
| 1907 | AGUCAUGAACCACGUUAACAGUG | 1516 | | JUN: 1927L21 antisense siNA | CUGUUAACGUGGUUCAUGATsT | 2182 |
| | | | | (1909C) stab10 | | |
| 1924 | ACAGUGGGUGCCAACUCAUGCUA | 1517 | | JUN: 1944L21 antisense siNA | GCAUGAGUUGGCACCCACUTsT | 2183 |
| | | | | (1926C) stab10 | | |
| 1930 | GGUGCCAACUCAUGCUAACGCAG | 1518 | | JUN: 1950L21 antisense siNA | GCGUUAGCAUGAGUUGGCATsT | 2184 |
| | | | | (1932C) stab10 | | |
| 1931 | GUGCCAACUCAUGCUAACGCAGC | 1519 | | JUN: 1951L21 antisense siNA | UGCGUUAGCAUGAGUUGGCTsT | 2185 |
| | | | | (1933C) stab10 | | |
| 1933 | GCCAACUCAUGCUAACGCAGCAG | 1520 | | JUN: 1953L21 antisense siNA | GCUGCGUUAGCAUGAGUUGTsT | 2186 |
| | | | | (1935C) stab10 | | |
| 1934 | CCAACUCAUGCUAACGCAGCAGU | 1521 | | JUN: 1954L21 antisense siNA | UGCUGCGUUAGCAUGAGUUTsT | 2187 |
| | | | | (1936C) stab10 | | |
| 1935 | CAACUCAUGCUAACGCAGCAGUU | 1522 | | JUN: 1955L21 antisense siNA | CUGCUGCGUUAGCAUGAGUTsT | 2188 |
| | | | | (1937C) stab10 | | |
| 2257 | AACAUUGACCAAGAACUGCAUGG | 1523 | | JUN: 2277L21 antisense siNA | AUGCAGUUCUUGGUCAAUGTsT | 2189 |
| | | | | (2259C) stab10 | | |
| 2258 | ACAUUGACCAAGAACUGCAUGGA | 1524 | | JUN: 2278L21 antisense siNA | CAUGCAGUUCUUGGUCAAUTsT | 2190 |
| | | | | (2260C) stab10 | | |
| 2259 | CAUUGACCAAGAACUGCAUGGAC | 1525 | | JUN: 2279L21 antisense siNA | CCAUGCAGUUCUUGGUCAATsT | 2191 |
| | | | | (2261C) stab10 | | |
| 2260 | AUUGACCAAGAACUGCAUGGACC | 1526 | | JUN: 2280L21 antisense siNA | UCCAUGCAGUUCUUGGUCATsT | 2192 |
| | | | | (2262C) stab10 | | |
| 2262 | UGACCAAGAACUGCAUGGACCUA | 1527 | | JUN: 2282L21 antisense siNA | GGUCCAUGCAGUUCUUGGUTsT | 2193 |
| | | | | (2264C) stab10 | | |
| 2264 | ACCAAGAACUGCAUGGACCUAAC | 1528 | | JUN: 2284L21 antisense siNA | UAGGUCCAUGCAGUUCUUGTsT | 2194 |
| | | | | (2266C) stab10 | | |
| 2266 | CAAGAACUGCAUGGACCUAACAU | 1529 | | JUN: 2286L21 antisense siNA | GUUAGGUCCAUGCAGUUCUTsT | 2195 |
| | | | | (2268C) stab10 | | |
| 2268 | AGAACUGCAUGGACCUAACAUUC | 1530 | | JUN: 2288L21 antisense siNA | AUGUUAGGUCCAUGCAGUUTsT | 2196 |
| | | | | (2270C) stab10 | | |
| 2269 | GAACUGCAUGGACCUAACAUUCG | 1531 | 32022 | JUN: 2289L21 antisense siNA | AAUGUUAGGUCCAUGCAGUTsT | 2197 |
| | | | | (2271C) stab10 | | |
| 2270 | AACUGCAUGGACCUAACAUUCGA | 1532 | | JUN: 2290L21 antisense siNA | GAAUGUUAGGUCCAUGCAGTsT | 2198 |
| | | | | (2272C) stab10 | | |
| 2272 | CUGCAUGGACCUAACAUUCGAUC | 1533 | 32023 | JUN: 2292L21 antisense siNA | UCGAAUGUUAGGUCCAUGCTsT | 2199 |
| | | | | (2274C) stab10 | | |
| 2274 | GCAUGGACCUAACAUUCGAUCUC | 1534 | | JUN: 2294L21 antisense siNA | GAUCGAAUGUUAGGUCCAUTsT | 2200 |
| | | | | (2276C) stab10 | | |
| 703 | AGUGACCGCGACUUUUCAAAGCC | 1507 | | JUN: 723L21 antisense siNA | cuuuGAAAAGucGcGGucATT B | 2201 |
| | | | | (705C) stab19 | | |
| 1486 | CAAACCUCAGCAACUUCAACCCA | 1508 | | JUN: 1506L21 antisense siNA | GGuuGAAGuuGcuGAGGuuTT B | 2202 |
| | | | | (1488C) stab19 | | |
| 1487 | AAACCUCAGCAACUUCAACCCAG | 1509 | | JUN: 1507L21 antisense siNA | GGGuuGAAGuuGcuGAGGuTT B | 2203 |
| | | | | (1489C) stab19 | | |
| 1816 | AGGAAAAAGUGAAAACCUUGAAA | 1510 | | JUN: 1836L21 antisense siNA | ucAAGGuuuucAcuuuuucTT B | 2204 |
| | | | | (1818C) stab19 | | |
| 1817 | GGAAAAAGUGAAAACCUUGAAAG | 1511 | | JUN: 1837L21 antisense siNA | uucAAGGuuuucAcuuuuuTT B | 2205 |
| | | | | (1819C) stab19 | | |
| 1875 | CUCAGGGAACAGGUGGCACAGCU | 1512 | | JUN: 1895L21 antisense siNA | cuGuGccAccuGuucccuGTT B | 2206 |
| | | | | (1877C) stab19 | | |
| 1901 | ACAGAAAGUCAUGAACCACGUUA | 1513 | | JUN: 1921L21 antisense siNA | AcGuGGuucAuGAcuuucuTT B | 2207 |
| | | | | (1903C) stab19 | | |
| 1902 | CAGAAAGUCAUGAACCACGUUAA | 1514 | | JUN: 1922L21 antisense siNA | AAcGuGGuucAuGAcuuucTT B | 2208 |
| | | | | (1904C) stab19 | | |
| 1904 | GAAAGUCAUGAACCACGUUAACA | 1515 | | JUN: 1924L21 antisense siNA | uuAAcGuGGuucAuGAcuuTT B | 2209 |
| | | | | (1906C) stab19 | | |
| 1907 | AGUCAUGAACCACGUUAACAGUG | 1516 | | JUN: 1927L21 antisense siNA | cuGuuAAcGuGGuucAuGATT B | 2210 |
| | | | | (1909C) stab19 | | |
| 1924 | ACAGUGGGUGCCAACUCAUGCUA | 1517 | | JUN: 1944L21 antisense siNA | GcAuGAGuuGGcAcccAcuTT B | 2211 |
| | | | | (1926C) stab19 | | |
| 1930 | GGUGCCAACUCAUGCUAACGCAG | 1518 | | JUN: 1950L21 antisense siNA | GcGuuAGcAuGAGuuGGcATT B | 2212 |
| | | | | (1932C) stab19 | | |
| 1931 | GUGCCAACUCAUGCUAACGCAGC | 1519 | | JUN: 1951L21 antisense siNA | uGcGuuAGcAuGAGuuGGcTT B | 2213 |
| | | | | (1933C) stab19 | | |
| 1933 | GCCAACUCAUGCUAACGCAGCAG | 1520 | | JUN: 1953L21 antisense siNA | GcuGcGuuAGcAuGAGuuGTT B | 2214 |
| | | | | (1935C) stab19 | | |
| 1934 | CCAACUCAUGCUAACGCAGCAGU | 1521 | | JUN: 1954L21 antisense siNA | uGcuGcGuuAGcAuGAGuuTT B | 2215 |
| | | | | (1936C) stab19 | | |
| 1935 | CAACUCAUGCUAACGCAGCAGUU | 1522 | | JUN: 1955L21 antisense siNA | cuGcuGcGuuAGcAuGAGuTT B | 2216 |
| | | | | (1937C) stab19 | | |
| 2257 | AACAUUGACCAAGAACUGCAUGG | 1523 | | JUN: 2277L21 antisense siNA | AuGcAGuucuuGGucAAuGTT B | 2217 |
| | | | | (2259C) stab19 | | |
| 2258 | ACAUUGACCAAGAACUGCAUGGA | 1524 | | JUN: 2278L21 antisense siNA | cAuGcAGuucuuGGucAAuTT B | 2218 |
| | | | | (2260C) stab19 | | |
| 2259 | CAUUGACCAAGAACUGCAUGGAC | 1525 | | JUN: 2279L21 antisense siNA | ccAuGcAGuucuuGGucAATT B | 2219 |
| | | | | (2261C) stab19 | | |
| 2260 | AUUGACCAAGAACUGCAUGGACC | 1526 | | JUN: 2280L21 antisense siNA | uccAuGcAGuucuuGGucATT B | 2220 |
| | | | | (2262C) stab19 | | |
| 2262 | UGACCAAGAACUGCAUGGACCUA | 1527 | | JUN: 2282L21 antisense siNA | GGuccAuGcAGuucuuGGuTT B | 2221 |
| | | | | (2264C) stab19 | | |
| 2264 | ACCAAGAACUGCAUGGACCUAAC | 1528 | | JUN: 2284L21 antisense siNA | uAGGuccAuGcAGuucuuGTT B | 2222 |
| | | | | (2266C) stab19 | | |
| 2266 | CAAGAACUGCAUGGACCUAACAU | 1529 | | JUN: 2286L21 antisense siNA | GuuAGGuccAuGcAGuucuTT B | 2223 |
| | | | | (2268C) stab19 | | |
| 2268 | AGAACUGCAUGGACCUAACAUUC | 1530 | | JUN: 2288L21 antisense siNA | AuGuuAGGuccAuGcAGuuTT B | 2224 |
| | | | | (2270C) stab19 | | |
| 2269 | GAACUGCAUGGACCUAACAUUCG | 1531 | | JUN: 2289L21 antisense siNA | AAuGuuAGGuccAuGcAGuTT B | 2225 |
| | | | | (2271C) stab19 | | |
| 2270 | AACUGCAUGGACCUAACAUUCGA | 1532 | | JUN: 2290L21 antisense siNA | GAAuGuuAGGuccAuGcAGTT B | 2226 |
| | | | | (2272C) stab19 | | |
| 2272 | CUGCAUGGACCUAACAUUCGAUC | 1533 | | JUN: 2292L21 antisense siNA | ucGAAuGuuAGGuccAuGcTT B | 2227 |
| | | | | (2274C) stab19 | | |
| 2274 | GCAUGGACCUAACAUUCGAUCUC | 1534 | | JUN: 2294L21 antisense siNA | GAucGAAuGuuAGGuccAuTT B | 2228 |
| | | | | (2276C) stab19 | | |
| 703 | AGUGACCGCGACUUUUCAAAGCC | 1507 | | JUN: 723L21 antisense siNA | CUUUGAAAAGUCGCGGUCATT B | 2229 |
| | | | | (705C) stab22 | | |
| 1486 | CAAACCUCAGCAACUUCAACCCA | 1508 | | JUN: 1506L21 antisense siNA | GGUUGAAGUUGCUGAGGUUTT B | 2230 |
| | | | | (1488C) stab22 | | |
| 1487 | AAACCUCAGCAACUUCAACCCAG | 1509 | | JUN: 1507L21 antisense siNA | GGGUUGAAGUUGCUGAGGUTT B | 2231 |
| | | | | (1489C) stab22 | | |
| 1816 | AGGAAAAAGUGAAAACCUUGAAA | 1510 | | JUN: 1836L21 antisense siNA | UCAAGGUUUUCACUUUUUCTT B | 2232 |
| | | | | (1818C) stab22 | | |
| 1817 | GGAAAAAGUGAAAACCUUGAAAG | 1511 | | JUN: 1837L21 antisense siNA | UUCAAGGUUUUCACUUUUUTT B | 2233 |
| | | | | (1819C) stab22 | | |
| 1875 | CUCAGGGAACAGGUGGCACAGCU | 1512 | | JUN: 1895L21 antisense siNA | CUGUGCCACCUGUUCCCUGTT B | 2234 |
| | | | | (1877C) stab22 | | |
| 1901 | ACAGAAAGUCAUGAACCACGUUA | 1513 | | JUN: 1921L21 antisense siNA | ACGUGGUUCAUGACUUUCUTT B | 2235 |
| | | | | (1903C) stab22 | | |
| 1902 | CAGAAAGUCAUGAACCACGUUAA | 1514 | | JUN: 1922L21 antisense siNA | AACGUGGUUCAUGACUUUCTT B | 2236 |
| | | | | (1904C) stab22 | | |
| 1904 | GAAAGUCAUGAACCACGUUAACA | 1515 | | JUN: 1924L21 antisense siNA | UUAACGUGGUUCAUGACUUTT B | 2237 |
| | | | | (1906C) stab22 | | |
| 1907 | AGUCAUGAACCACGUUAACAGUG | 1516 | | JUN: 1927L21 antisense siNA | CUGUUAACGUGGUUCAUGATT B | 2238 |
| | | | | (1909C) stab22 | | |
| 1924 | ACAGUGGGUGCCAACUCAUGCUA | 1517 | | JUN: 1944L21 antisense siNA | GCAUGAGUUGGCACCCACUTT B | 2239 |
| | | | | (1926C) stab22 | | |
| 1930 | GGUGCCAACUCAUGCUAACGCAG | 1518 | | JUN: 1950L21 antisense siNA | GCGUUAGCAUGAGUUGGCATT B | 2240 |
| | | | | (1932C) stab22 | | |
| 1931 | GUGCCAACUCAUGCUAACGCAGC | 1519 | | JUN: 1951L21 antisense siNA | UGCGUUAGCAUGAGUUGGCTT B | 2241 |
| | | | | (1933C) stab22 | | |
| 1933 | GCCAACUCAUGCUAACGCAGCAG | 1520 | | JUN: 1953L21 antisense siNA | GCUGCGUUAGCAUGAGUUGTT B | 2242 |
| | | | | (1935C) stab22 | | |
| 1934 | CCAACUCAUGCUAACGCAGCAGU | 1521 | | JUN: 1954L21 antisense siNA | UGCUGCGUUAGCAUGAGUUTT B | 2243 |
| | | | | (1936C) stab22 | | |
| 1935 | CAACUCAUGCUAACGCAGCAGUU | 1522 | | JUN: 1955L21 antisense siNA | CUGCUGCGUUAGCAUGAGUTT B | 2244 |
| | | | | (1937C) stab22 | | |
| 2257 | AACAUUGACCAAGAACUGCAUGG | 1523 | | JUN: 2277L21 antisense siNA | AUGCAGUUCUUGGUCAAUGTT B | 2245 |
| | | | | (2259C) stab22 | | |
| 2258 | ACAUUGACCAAGAACUGCAUGGA | 1524 | | JUN: 2278L21 antisense siNA | CAUGCAGUUCUUGGUCAAUTT B | 2246 |
| | | | | (2260C) stab22 | | |
| 2259 | CAUUGACCAAGAACUGCAUGGAC | 1525 | | JUN: 2279L21 antisense siNA | CCAUGCAGUUCUUGGUCAATT B | 2247 |
| | | | | (2261C) stab22 | | |
| 2260 | AUUGACCAAGAACUGCAUGGACC | 1526 | | JUN: 2280L21 antisense siNA | UCCAUGCAGUUCUUGGUCATT B | 2248 |
| | | | | (2262C) stab22 | | |
| 2262 | UGACCAAGAACUGCAUGGACCUA | 1527 | | JUN: 2282L21 antisense siNA | GGUCCAUGCAGUUCUUGGUTT B | 2249 |
| | | | | (2264C) stab22 | | |
| 2264 | ACCAAGAACUGCAUGGACCUAAC | 1528 | | JUN: 2284L21 antisense siNA | UAGGUCCAUGCAGUUCUUGTT B | 2250 |
| | | | | (2266C) stab22 | | |
| 2266 | CAAGAACUGCAUGGACCUAACAU | 1529 | | JUN: 2286L21 antisense siNA | GUUAGGUCCAUGCAGUUCUTT B | 2251 |
| | | | | (2268C) stab22 | | |
| 2268 | AGAACUGCAUGGACCUAACAUUC | 1530 | | JUN: 2288L21 antisense siNA | AUGUUAGGUCCAUGCAGUUTT B | 2252 |
| | | | | (2270C) stab22 | | |
| 2269 | GAACUGCAUGGACCUAACAUUCG | 1531 | | JUN: 2289L21 antisense siNA | AAUGUUAGGUCCAUGCAGUTT B | 2253 |
| | | | | (2271C) stab22 | | |
| 2270 | AACUGCAUGGACCUAACAUUCGA | 1532 | | JUN: 2290L21 antisense siNA | GAAUGUUAGGUCCAUGCAGTT B | 2254 |
| | | | | (2272C) stab22 | | |
| 2272 | CUGCAUGGACCUAACAUUCGAUC | 1533 | | JUN: 2292L21 antisense siNA | UCGAAUGUUAGGUCCAUGCTT B | 2255 |
| | | | | (2274C) stab22 | | |
| 2274 | GCAUGGACCUAACAUUCGAUCUC | 1534 | | JUN: 2294L21 antisense siNA | GAUCGAAUGUUAGGUCCAUTT B | 2256 |
| | | | | (2276C) stab22 | | |
| 2269 | GAACUGCAUGGACCUAACAUUCG | 1531 | 32018 | JUN: 2271U21 sense siNA | AcuGcAuGGAccuAAcAuuTsT | 2257 |
| | | | | stab08 | | |
| 2272 | CUGCAUGGACCUAACAUUCGAUC | 1533 | 32019 | JUN: 2274U21 sense siNA | GcAuGGAccuAAcAuucGATsT | 2258 |
| | | | | stab08 | | |
| 2269 | GAACUGCAUGGACCUAACAUUCG | 1531 | 32024 | JUN: 2271U21 sense siNA | B ACUGCAUGGACCUAACAUUTT B | 2259 |
| | | | | stab16 | | |
| 2272 | CUGCAUGGACCUAACAUUCGAUC | 1533 | 32025 | JUN: 2274U21 sense siNA | B GCAUGGACCUAACAUUCGATT B | 2260 |
| | | | | stab16 | | |
| 1819 | GGAAAAAGUGAAAACCUUGAAAG | 1511 | 31834 | JUN: 1819U21 sense siNA inv | B AAGuuccAAAAGuGAAAAATT B | 2261 |
| | | | | stab07 | | |
| 1937 | CAACUCAUGCUAACGCAGCAGUU | 1522 | 31835 | JUN: 1937U21 sense siNA inv | B GAcGAcGcAAucGuAcucATT B | 2262 |
| | | | | stab07 | | |
| 2261 | CAUUGACCAAGAACUGCAUGGAC | 1525 | 31836 | JUN: 2261U21 sense siNA inv | B GGuAcGucAAGAAccAGuuTT B | 2263 |
| | | | | stab07 | | |
| 2266 | ACCAAGAACUGCAUGGACCUAAC | 1528 | 31837 | JUN: 2266U21 sense siNA inv | B AuccAGGuAcGucAAGAAcTT B | 2264 |
| | | | | stab07 | | |
| 2271 | GAACUGCAUGGACCUAACAUUCG | 1531 | 31838 | JUN: 2271U21 sense siNA inv | B uuAcAAuccAGGuAcGucATT B | 2265 |
| | | | | stab07 | | |
| 2272 | AACUGCAUGGACCUAACAUUCGA | 1532 | 31839 | JUN: 2272U21 sense siNA inv | B cuuAcAAuccAGGuAcGucTT B | 2266 |
| | | | | stab07 | | |
| 2274 | CUGCAUGGACCUAACAUUCGAUC | 1533 | 31840 | JUN: 2274U21 sense siNA inv | B AGcuuAcAAuccAGGuAcGTT B | 2267 |
| | | | | stab07 | | |
| 2276 | GCAUGGACCUAACAUUCGAUCUC | 1534 | 31841 | JUN: 2276U21 sense siNA inv | B cuAGcuuAcAAuccAGGuATT B | 2268 |
| | | | | stab07 | | |
| 1819 | GGAAAAAGUGAAAACCUUGAAAG | 1511 | 31842 | JUN: 1837L21 antisense siNA | uuuuucAcuuuuGGAAcuuTsT | 2269 |
| | | | | (1819C) inv stab08 | | |
| 1937 | CAACUCAUGCUAACGCAGCAGUU | 1522 | 31843 | JUN: 1955L21 antisense siNA | uGAGuAcGAuuGcGucGucTsT | 2270 |
| | | | | (1937C) inv stab08 | | |
| 2261 | CAUUGACCAAGAACUGCAUGGAC | 1525 | 31844 | JUN: 2279L21 antisense siNA | AAcuGGuucuuGAcGuAccTsT | 2271 |
| | | | | (2261C) inv stab08 | | |
| 2266 | ACCAAGAACUGCAUGGACCUAAC | 1528 | 31845 | JUN: 2284L21 antisense siNA | GuucuuGAcGuAccuGGAuTsT | 2272 |
| | | | | (2266C) inv stab08 | | |
| 2271 | GAACUGCAUGGACCUAACAUUCG | 1531 | 31846 | JUN: 2289L21 antisense siNA | uGAcGuAccuGGAuuGuAATsT | 2273 |
| | | | | (2271C) inv stab08 | | |
| 2272 | AACUGCAUGGACCUAACAUUCGA | 1532 | 31847 | JUN: 2290L21 antisense siNA | GAcGuAccuGGAuuGuAAGTsT | 2274 |
| | | | | (2272C) inv stab08 | | |
| 2274 | CUGCAUGGACCUAACAUUCGAUC | 1533 | 31848 | JUN: 2292L21 antisense siNA | cGuAccuGGAuuGuAAGcuTsT | 2275 |
| | | | | (2274C) inv stab08 | | |
| 2276 | GCAUGGACCUAACAUUCGAUCUC | 1534 | 31849 | JUN: 2294L21 antisense siNA | uAccuGGAuuGuAAGcuAGTsT | 2276 |
| | | | | (2276C) inv stab08 | | |
| 2271 | GAACUGCAUGGACCUAACAUUCG | 1531 | 32026 | JUN: 2271U21 sense siNA inv | UUACAAUCCAGGUACGUCATT | 2277 |
| 2274 | CUGCAUGGACCUAACAUUCGAUC | 1533 | 32027 | JUN: 2274U21 sense siNA inv | AGCUUACAAUCCAGGUACGTT | 2278 |
| 2271 | GAACUGCAUGGACCUAACAUUCG | 1531 | 32028 | JUN: 2289L21 antisense siNA | UGACGUACCUGGAUUGUAATT | 2279 |
| | | | | (2271C) inv | | |
| 2274 | CUGCAUGGACCUAACAUUCGAUC | 1533 | 32029 | JUN: 2292L21 antisense siNA | CGUACCUGGAUUGUAAGCUTT | 2280 |
| | | | | (2274C) inv | | |
| 2271 | GAACUGCAUGGACCUAACAUUCG | 1531 | 32030 | JUN: 2271U21 sense siNA inv | B uuAcAAuccAGGuAcGucATT B | 2281 |
| | | | | stab04 | | |
| 2274 | CUGCAUGGACCUAACAUUCGAUC | 1533 | 32031 | JUN: 2274U21 sense siNA inv | B AGcuuAcAAuccAGGuAcGTT B | 2282 |
| | | | | stab04 | | |
| 2271 | GAACUGCAUGGACCUAACAUUCG | 1531 | 32032 | JUN: 2289L21 antisense siNA | uGAcGuAccuGGAuuGuAATsT | 2283 |
| | | | | (2271C) inv stab05 | | |
| 2274 | CUGCAUGGACCUAACAUUCGAUC | 1533 | 32033 | JUN: 2292L21 antisense siNA | cGuAccuGGAuuGuAAGcuTsT | 2284 |
| | | | | (2274C) inv stab05 | | |
| 2271 | GAACUGCAUGGACCUAACAUUCG | 1531 | 32034 | JUN: 2271U21 sense siNA inv | uuAcAAuccAGGuAcGucATsT | 2285 |
| | | | | stab08 | | |
| 2274 | CUGCAUGGACCUAACAUUCGAUC | 1533 | 32035 | JUN: 2274U21 sense siNA inv | AGcuuAcAAuccAGGuAcGTsT | 2286 |
| | | | | stab08 | | |
| 2271 | GAACUGCAUGGACCUAACAUUCG | 1531 | 32036 | JUN: 2271U21 sense siNA inv | B UUACAAUCCAGGUACGUCATT B | 2287 |
| | | | | stab09 | | |
| 2274 | CUGCAUGGACCUAACAUUCGAUC | 1533 | 32037 | JUN: 2274U21 sense siNA inv | B AGCUUACAAUCCAGGUACGTT B | 2288 |
| | | | | stab09 | | |
| 2271 | GAACUGCAUGGACCUAACAUUCG | 1531 | 32038 | JUN: 2289L21 antisense siNA | UGACGUACCUGGAUUGUAATsT | 2289 |
| | | | | (2271C) inv stab10 | | |
| 2274 | CUGCAUGGACCUAACAUUCGAUC | 1533 | 32039 | JUN: 2292L21 antisense siNA | CGUACCUGGAUUGUAAGCUTsT | 2290 |
| | | | | (2274C) inv stab10 | | |
| 2271 | GAACUGCAUGGACCUAACAUUCG | 1531 | 32040 | JUN: 2271U21 sense siNA inv | B UUACAAUCCAGGUACGUCATT B | 2291 |
| | | | | stab16 | | |
| 2274 | CUGCAUGGACCUAACAUUCGAUC | 1533 | 32041 | JUN: 2274U21 sense siNA inv | B AGCUUACAAUCCAGGUACGTT B | 2292 |
| | | | | stab16 | | |
| 2271 | GAACUGCAUGGACCUAACAUUCG | 1531 | 32083 | JUN: 2271U21 sense siNA inv | B uuAcAAuccAGGuAcGucATT B | 2293 |
| | | | | stab18 | | |
| 2274 | CUGCAUGGACCUAACAUUCGAUC | 1533 | 32084 | JUN: 2274U21 sense siNA inv | B AGcuuAcAAuccAGGuAcGTT B | 2294 |
| | | | | stab18 | | |
| 705 | AGUGACCGCGACUUUUCAAAGCC | 1507 | 32125 | JUN: 705U21 sense siNA inv | B GAAAcuuuucAGcGccAGuTT B | 2295 |
| | | | | stab07 | | |
| 1488 | CAAACCUCAGCAACUUCAACCCA | 1508 | 32126 | JUN: 1488U21 sense siNA inv | B ccAAcuucAAcGAcuccAATT B | 2296 |
| | | | | stab07 | | |
| 1489 | AAACCUCAGCAACUUCAACCCAG | 1509 | 32127 | JUN: 1489U21 sense siNA inv | B cccAAcuucAAcGAcuccATT B | 2297 |
| | | | | stab07 | | |
| 1818 | AGGAAAAAGUGAAAACCUUGAAA | 1510 | 32128 | JUN: 1818U21 sense siNA inv | B AGuuccAAAAGuGAAAAAGTT B | 2298 |
| | | | | stab07 | | |
| 1877 | CUCAGGGAACAGGUGGCACAGCU | 1512 | 32129 | JUN: 1877U21 sense siNA inv | B GAcAcGGuGGAcAAGGGAcTT B | 2299 |
| | | | | stab07 | | |
| 1903 | ACAGAAAGUCAUGAACCACGUUA | 1513 | 32130 | JUN: 1903U21 sense siNA inv | B uGcAccAAGuAcuGAAAGATT B | 2300 |
| | | | | stab07 | | |
| 1904 | CAGAAAGUCAUGAACCACGUUAA | 1514 | 32131 | JUN: 1904U21 sense siNA inv | B uuGcAccAAGuAcuGAAAGTT B | 2301 |
| | | | | stab07 | | |
| 1906 | GAAAGUCAUGAACCACGUUAACA | 1515 | 32132 | JUN: 1906U21 sense siNA inv | B AAuuGcAccAAGuAcuGAATT B | 2302 |
| | | | | stab07 | | |
| 1909 | AGUCAUGAACCACGUUAACAGUG | 1516 | 32133 | JUN: 1909U21 sense siNA inv | B GAcAAuuGcAccAAGuAcuTT B | 2303 |
| | | | | stab07 | | |
| 1926 | ACAGUGGGUGCCAACUCAUGCUA | 1517 | 32134 | JUN: 1926U21 sense siNA inv | B cGuAcucAAccGuGGGuGATT B | 2304 |
| | | | | stab07 | | |
| 1932 | GGUGCCAACUCAUGCUAACGCAG | 1518 | 32135 | JUN: 1932U21 sense siNA inv | B cGcAAucGuAcucAAccGuTT B | 2305 |
| | | | | stab07 | | |
| 1933 | GUGCCAACUCAUGCUAACGCAGC | 1519 | 32136 | JUN: 1933U21 sense siNA inv | B AcGcAAucGuAcucAAccGTT B | 2306 |
| | | | | stab07 | | |
| 1935 | GCCAACUCAUGCUAACGCAGCAG | 1520 | 32137 | JUN: 1935U21 sense siNA inv | B cGAcGcAAucGuAcucAAcTT B | 2307 |
| | | | | stab07 | | |
| 1936 | CCAACUCAUGCUAACGCAGCAGU | 1521 | 32138 | JUN: 1936U21 sense siNA inv | B AcGAcGcAAucGuAcucAATT B | 2308 |
| | | | | stab07 | | |
| 2259 | AACAUUGACCAAGAACUGCAUGG | 1523 | 32139 | JUN: 2259U21 sense siNA inv | B uAcGucAAGAAccAGuuAcTT B | 2309 |
| | | | | stab07 | | |
| 2260 | ACAUUGACCAAGAACUGCAUGGA | 1524 | 32140 | JUN: 2260U21 sense siNA inv | B GuAcGucAAGAAccAGuuATT B | 2310 |
| | | | | stab07 | | |
| 2262 | AUUGACCAAGAACUGCAUGGACC | 1526 | 32141 | JUN: 2262U21 sense siNA inv | B AGGuAcGucAAGAAccAGuTT B | 2311 |
| | | | | stab07 | | |
| 2264 | UGACCAAGAACUGCAUGGACCUA | 1527 | 32142 | JUN: 2264U21 sense siNA inv | B ccAGGuAcGucAAGAAccATT B | 2312 |
| | | | | stab07 | | |
| 2268 | CAAGAACUGCAUGGACCUAACAU | 1529 | 32143 | JUN: 2268U21 sense siNA inv | B cAAuccAGGuAcGucAAGATT B | 2313 |
| | | | | stab07 | | |
| 2270 | AGAACUGCAUGGACCUAACAUUC | 1530 | 32144 | JUN: 2270U21 sense siNA inv | B uAcAAuccAGGuAcGucAATT B | 2314 |
| | | | | stab07 | | |
| 705 | AGUGACCGCGACUUUUCAAAGCC | 1507 | 32145 | JUN: 723L21 antisense siNA | AcuGGcGcuGAAAAGuuucTsT | 2315 |
| | | | | (705C) inv stab08 | | |
| 1488 | CAAACCUCAGCAACUUCAACCCA | 1508 | 32146 | JUN: 1506L21 antisense siNA | uuGGAGucGuuGAAGuuGGTsT | 2316 |
| | | | | (1488C) inv stab08 | | |
| 1489 | AAACCUCAGCAACUUCAACCCAG | 1509 | 32147 | JUN: 1507L21 antisense siNA | uGGAGucGuuGAAGuuGGGTsT | 2317 |
| | | | | (1489C) inv stab08 | | |
| 1818 | AGGAAAAAGUGAAAACCUUGAAA | 1510 | 32148 | JUN: 1836L21 antisense siNA | cuuuuucAcuuuuGGAAcuTsT | 2318 |
| | | | | (1818C) inv stab08 | | |
| 1877 | CUCAGGGAACAGGUGGCACAGCU | 1512 | 32149 | JUN: 1895L21 antisense siNA | GucccuuGuccAccGuGucTsT | 2319 |
| | | | | (1877C) inv stab08 | | |
| 1903 | ACAGAAAGUCAUGAACCACGUUA | 1513 | 32150 | JUN: 1921L21 antisense siNA | ucuuucAGuAcuuGGuGcATsT | 2320 |
| | | | | (1903C) inv stab08 | | |
| 1904 | CAGAAAGUCAUGAACCACGUUAA | 1514 | 32151 | JUN: 1922L21 antisense siNA | cuuucAGuAcuuGGuGcAATsT | 2321 |
| | | | | (1904C) inv stab08 | | |
| 1906 | GAAAGUCAUGAACCACGUUAACA | 1515 | 32152 | JUN: 1924L21 antisense siNA | uucAGuAcuuGGuGcAAuuTsT | 2322 |
| | | | | (1906C) inv stab08 | | |
| 1909 | AGUCAUGAACCACGUUAACAGUG | 1516 | 32153 | JUN: 1927L21 antisense siNA | AGuAcuuGGuGcAAuuGucTsT | 2323 |
| | | | | (1909C) inv stab08 | | |
| 1926 | ACAGUGGGUGCCAACUCAUGCUA | 1517 | 32154 | JUN: 1944L21 antisense siNA | ucAcccAcGGuuGAGuAcGTsT | 2324 |
| | | | | (1926C) inv stab08 | | |
| 1932 | GGUGCCAACUCAUGCUAACGCAG | 1518 | 32155 | JUN: 1950L21 antisense siNA | AcGGuuGAGuAcGAuuGcGTsT | 2325 |
| | | | | (1932C) inv stab08 | | |
| 1933 | GUGCCAACUCAUGCUAACGCAGC | 1519 | 32156 | JUN: 1951L21 antisense siNA | cGGuuGAGuAcGAuuGcGuTsT | 2326 |
| | | | | (1933C) inv stab08 | | |
| 1935 | GCCAACUCAUGCUAACGCAGCAG | 1520 | 32157 | JUN: 1953L21 antisense siNA | GuuGAGuAcGAuuGcGucGTsT | 2327 |
| | | | | (1935C) inv stab08 | | |
| 1936 | CCAACUCAUGCUAACGCAGCAGU | 1521 | 32158 | JUN: 1954L21 antisense siNA | uuGAGuAcGAuuGcGucGuTsT | 2328 |
| | | | | (1936C) inv stab08 | | |
| 2259 | AACAUUGACCAAGAACUGCAUGG | 1523 | 32159 | JUN: 2277L21 antisense siNA | GuAAcuGGuucuuGAcGuATsT | 2329 |
| | | | | (2259C) inv stab08 | | |
| 2260 | ACAUUGACCAAGAACUGCAUGGA | 1524 | 32160 | JUN: 2278L21 antisense siNA | uAAcuGGuucuuGAcGuAcTsT | 2330 |
| | | | | (2260C) inv stab08 | | |
| 2262 | AUUGACCAAGAACUGCAUGGACC | 1526 | 32161 | JUN: 2280L21 antisense siNA | AcuGGuucuuGAcGuAccuTsT | 2331 |
| | | | | (2262C) inv stab08 | | |
| 2264 | UGACCAAGAACUGCAUGGACCUA | 1527 | 32162 | JUN: 2282L21 antisense siNA | uGGuucuuGAcGuAccuGGTsT | 2332 |
| | | | | (2264C) inv stab08 | | |
| 2268 | CAAGAACUGCAUGGACCUAACAU | 1529 | 32163 | JUN: 2286L21 antisense siNA | ucuuGAcGuAccuGGAuuGTsT | 2333 |
| | | | | (2268C) inv stab08 | | |
| 2270 | AGAACUGCAUGGACCUAACAUUC | 1530 | 32164 | JUN: 2288L21 antisense siNA | uuGAcGuAccuGGAuuGuATsT | 2334 |
| | | | | (2270C) inv stab08 | | |
| 1903 | ACAGAAAGUCAUGAACCACGUUA | 1513 | 32334 | JUN: 1903U21 sense siNA inv | B UGCACCAAGUACUGAAAGATT B | 2335 |
| | | | | stab09 | | |
| 1906 | GAAAGUCAUGAACCACGUUAACA | 1515 | 32335 | JUN: 1906U21 sense siNA inv | B AAUUGCACCAAGUACUGAATT B | 2336 |
| | | | | stab09 | | |
| 1903 | ACAGAAAGUCAUGAACCACGUUA | 1513 | 32336 | JUN: 1921L21 antisensesiNA | UCUUUCAGUACUUGGUGCATsT | 2337 |
| | | | | (1903C) inv stab10 | | |
| 1906 | GAAAGUCAUGAACCACGUUAACA | 1515 | 32337 | JUN: 1924L21 antisense siNA | UUCAGUACUUGGUGCAAUUTsT | 2338 |
| | | | | (1906C) inv stab10 | | |

Uppercase = ribonucleotide
u,c = 2′-deoxy-2′-fluoro U,C
T = thymidine
B = inverted deoxy abasic
s = phosphorothioate linkage
A = deoxy Adenosine
G = deoxy Guanosine
G = 2′-O-methyl Guanosine
A = 2′-O-methyl Adenosine

[0448] TABLE IV
Non-limiting examples of Stabilization Chemistries
for chemically modified siNA constructs

| | pyri- | | | | |
|---|---|---|---|---|---|
| Chemistry | midine | Purine | cap | p = S | Strand |
| “Stab 00” | Ribo | Ribo | TT at 3′- | | S/AS |
| | | | ends | | |
| “Stab 1” | Ribo | Ribo | — | 5 at 5′-end | S/AS |
| | | | | 1 at 3′-end | |
| “Stab 2” | Ribo | Ribo | — | All | Usually AS |
| | | | | linkages | |
| “Stab 3” | 2′-fluoro | Ribo | — | 4 at 5′-end | Usually S |
| | | | | 4 at 3′-end | |
| “Stab 4” | 2′-fluoro | Ribo | 5′ and 3′- | — | Usually S |
| | | | ends | | |
| “Stab 5” | 2′-fluoro | Ribo | — | 1 at 3′-end | Usually AS |
| “Stab 6” | 2′-O- | Ribo | 5′ and 3′- | — | Usually S |
| | Methyl | | ends | | |
| “Stab 7” | 2′-fluoro | 2′-deoxy | 5′ and 3′- | — | Usually S |
| | | | ends | | |
| “Stab 8” | 2′-fluoro | 2′-O- | — | 1 at 3′-end | S/AS |
| | | Methyl | | | |
| “Stab 9” | Ribo | Ribo | 5′ and 3′- | — | Usually S |
| | | | ends | | |
| “Stab 10” | Ribo | Ribo | — | 1 at 3′-end | Usually AS |
| “Stab 11” | 2′-fluoro | 2′-deoxy | — | 1 at 3′-end | Usually AS |
| “Stab 12” | 2′-fluoro | LNA | 5′ and 3′- | | Usually S |
| | | | ends | | |
| “Stab 13” | 2′-fluoro | LNA | | 1 at 3′-end | Usually AS |
| “Stab 14” | 2′-fluoro | 2′-deoxy | | 2 at 5′-end | Usually AS |
| | | | | 1 at 3′-end | |
| “Stab 15” | 2′-deoxy | 2′-deoxy | | 2 at 5′-end | Usually AS |
| | | | | 1 at 3′-end | |
| “Stab 16” | Ribo | 2′-O- | 5′ and 3′- | | Usually S |
| | | Methyl | ends | | |
| “Stab 17” | 2′-O- | 2′-O- | 5′ and 3′- | | Usually S |
| | Methyl | Methyl | ends | | |
| “Stab 18” | 2′-fluoro | 2′-O- | 5′ and 3′- | | Usually S |
| | | Methyl | ends | | |
| “Stab 19” | 2′-fluoro | 2′-O- | 3′-end | | S/AS |
| | | Methyl | | | |
| “Stab 20” | 2′-fluoro | 2′-deoxy | 3′-end | | Usually AS |
| “Stab 21” | 2′-fluoro | Ribo | 3′-end | | Usually AS |
| “Stab 22” | Ribo | Ribo | 3′-end | | Usually AS |
| “Stab 23” | 2′-fluoro* | 2′-deoxy* | 5′ and 3′- | | Usually S |
| | | | ends | | |
| “Stab 24” | 2′-fluoro* | 2′-O- | — | 1 at 3′-end | S/AS |
| | | Methyl* | | | |
| “Stab 25” | 2′-fluoro* | 2′-O- | — | 1 at 3′-end | S/AS |
| | | Methyl* | | | |
| “Stab 26” | 2′-fluoro* | 2′-O- | — | | S/AS |
| | | Methyl* | | | |
| “Stab 27” | 2′-fluoro* | 2′-O- | 3′-end | | S/AS |
| | | Methyl* | | | |
| “Stab 28” | 2′-fluoro* | 2′-O- | 3′-end | | S/AS |
| | | Methyl* | | | |
| “Stab 29” | 2′-fluoro* | 2′-O- | | 1 at 3′-end | S/AS |
| | | Methyl* | | | |
| “Stab 30” | 2′-fluoro* | 2′-O- | | | S/AS |
| | | Methyl* | | | |
| “Stab 31” | 2′-fluoro* | 2′-O- | 3′-end | | S/AS |
| | | Methyl* | | | |
| “Stab 32” | 2′-fluoro | 2′-O- | | | S/AS |
| | | Methyl | | | |

CAP = any terminal cap, see for example FIG. 10.
All Stab 00-32 chemistries can comprise 3′-terminal thymidine (TT) residues
All Stab 00-32 chemistries typically comprise about 21 nucleotides, but can vary as described herein.
S = sense strand
AS = antisense strand
*Stab 23 has a single ribonucleotide adjacent to 3′-CAP
*Stab 24 and Stab 28 have a single ribonucleotide at 5′-terminus
*Stab 25, Stab 26, and Stab 27 have three ribonucleotides at 5′-terminus
*Stab 29, Stab 30, and Stab 31, any purine at first three nucleotide positions from 5′-terminus are ribonucleotides
p = phosphorothioate linkage

[0449] TABLE V

| | | | | | |
|---|---|---|---|---|---|
| Reagent | Equivalents | Amount | Wait Time* DNA | Wait Time* 2′-O-methyl | Wait Time*RNA |

A. 2.5 μmol Synthesis Cycle ABI 394 Instrument

| | | | | | | | | | |
|---|---|---|---|---|---|---|---|---|---|
| Phosphoramidites | 6.5 | 163 | μL | 45 | sec | 2.5 | min | 7.5 | min |
| S-Ethyl Tetrazole | 23.8 | 238 | μL | 45 | sec | 2.5 | min | 7.5 | min |
| Acetic Anhydride | 100 | 233 | μL | 5 | sec | 5 | sec | 5 | sec |
| N-Methyl | 186 | 233 | μL | 5 | sec | 5 | sec | 5 | sec |
| Imidazole | | | | | | | | | |
| TCA | 176 | 2.3 | mL | 21 | sec | 21 | sec | 21 | sec |
| Iodine | 11.2 | 1.7 | mL | 45 | sec | 45 | sec | 45 | sec |
| Beaucage | 12.9 | 645 | μL | 100 | sec | 300 | sec | 300 | sec |

| | | | | | | |
|---|---|---|---|---|---|---|
| Acetonitrile | NA | 6.67 | mL | NA | NA | NA |

B. 0.2 μmol Synthesis Cycle ABI 394 Instrument

| | | | | | | | | | |
|---|---|---|---|---|---|---|---|---|---|
| Phosphoramidites | 15 | 31 | μL | 45 | sec | 233 | sec | 465 | sec |
| S-Ethyl Tetrazole | 38.7 | 31 | μL | 45 | sec | 233 | min | 465 | sec |
| Acetic Anhydride | 655 | 124 | μL | 5 | sec | 5 | sec | 5 | sec |
| N-Methyl | 1245 | 124 | μL | 5 | sec | 5 | sec | 5 | sec |
| Imidazole | | | | | | | | | |
| TCA | 700 | 732 | μL | 10 | sec | 10 | sec | 10 | sec |
| Iodine | 20.6 | 244 | μL | 15 | sec | 15 | sec | 15 | sec |
| Beaucage | 7.7 | 232 | μL | 100 | sec | 300 | sec | 300 | sec |

| | | | | | | |
|---|---|---|---|---|---|---|
| Acetonitrile | NA | 2.64 | mL | NA | NA | NA |

C. 0.2 μmol Synthesis Cycle 96 well Instrument

| | | | | | |
|---|---|---|---|---|---|
| | | Amount: | | Wait Time* | |
| | Equivalents: DNA/ | DNA/2′-O- | Wait Time* | 2′-O- | Wait Time* |
| Reagent | 2′-O-methyl/Ribo | methyl/Ribo | DNA | methyl | Ribo |

| | | | | | | | | | |
|---|---|---|---|---|---|---|---|---|---|
| Phosphoramidites | 22/33/66 | 40/60/120 | μL | 60 | sec | 180 | sec | 360 | sec |
| S-Ethyl Tetrazole | 70/105/210 | 40/60/120 | μL | 60 | sec | 180 | min | 360 | sec |
| Acetic Anhydride | 265/265/265 | 50/50/50 | μL | 10 | sec | 10 | sec | 10 | sec |
| N-Methyl | 502/502/502 | 50/50/50 | μL | 10 | sec | 10 | sec | 10 | sec |
| Imidazole | | | | | | | | | |
| TCA | 238/475/475 | 250/500/500 | μL | 15 | sec | 15 | sec | 15 | sec |
| Iodine | 6.8/6.8/6.8 | 80/80/80 | μL | 30 | sec | 30 | sec | 30 | sec |
| Beaucage | 34/51/51 | 80/120/120 | | 100 | sec | 200 | sec | 200 | sec |

| | | | | | | |
|---|---|---|---|---|---|---|
| Acetonitrile | NA | 1150/1150/1150 | μL | NA | NA | NA |

*Wait time does not include contact time during delivery.
*Tandem synthesis utilizes double coupling of linker molecule

1. A chemically synthesized double stranded short interfering nucleic acid (siNA) molecule that directs cleavage of a p38 RNA via RNA interference (RNAi), wherein:
a) each strand of said siNA molecule is about 18 to about 23 nucleotides in length; and
b) one strand of said siNA molecule comprises nucleotide sequence having sufficient complementarity to said p38 RNA for the siNA molecule to direct cleavage of the p38 RNA via RNA interference.

2. The siNA molecule of claim 1, wherein said siNA molecule comprises no ribonucleotides.

3. The siNA molecule of claim 1, wherein said siNA molecule comprises one or more ribonucteotides.

4. The siNA molecule of claim 1, wherein one strand of said double-stranded siNA molecule comprises a nucleotide sequence that is complementary to a nucleotide sequence of a p38 gene or a portion thereof, and wherein a second strand of said double-stranded siNA molecule comprises a nucleotide sequence substantially similar to the nucleotide sequence or a portion thereof of said p38 RNA.

5. The siNA molecule of claim 4, wherein each strand of the siNA molecule comprises about 18 to about 23 nucleotides, and wherein each strand comprises at least about 19 nucleotides that are complementary to the nucleotides of the other strand.

6. The siNA molecule of claim 1, wherein said siNA molecule comprises an antisense region comprising a nucleotide sequence that is complementary to a nucleotide sequence of a p38 gene or a portion thereof, and wherein said siNA further comprises a sense region, wherein said sense region comprises a nucleotide sequence substantially similar to the nucleotide sequence of said p38 gene or a portion thereof.

7. The siNA molecule of claim 6, wherein said antisense region and said sense region comprise about 18 to about 23 nucleotides, and wherein said antisense region comprises at least about 18 nucleotides that are complementary to nucleotides of the sense region.

8. The siNA molecule of claim 1, wherein said siNA molecule comprises a sense region and an antisense region, and wherein said antisense region comprises a nucleotide sequence that is complementary to a nucleotide sequence of RNA encoded by a p38 gene, or a portion thereof, and said sense region comprises a nucleotide sequence that is complementary to said antisense region.

9. The siNA molecule of claim 6, wherein said siNA molecule is assembled from two separate oligonucleotide fragments wherein one fragment comprises the sense region and a second fragment comprises the antisense region of said siNA molecule.

10. The siNA molecule of claim 6, wherein said sense region is connected to the antisense region via a linker molecule.

11. The siNA molecule of claim 10, wherein said linker molecule is a polynucleotide linker.

12. The siNA molecule of claim 10, wherein said linker molecule is a non-nucleotide linker.

13. The siNA molecule of claim 6, wherein pyrimidine nucleotides in the sense region are 2′-O-methylpyrimidine nucleotides.

14. The siNA molecule of claim 6, wherein purine nucleotides in the sense region are 2′-deoxy purine nucleotides.

15. The siNA molecule of claim 6, wherein pyrimidine nucleotides present in the sense region are 2′-deoxy-2′-fluoro pyrimidine nucleotides.

16. The siNA molecule of claim 9, wherein the fragment comprising said sense region includes a terminal cap moiety at a 5′-end, a 3′-end, or both of the 5′ and 3′ ends of the fragment comprising said sense region.

17. The siNA molecule of claim 16, wherein said terminal cap moiety is an inverted deoxy abasic moiety.

18. The siNA molecule of claim 6, wherein pyrimidine nucleotides of said antisense region are 2′-deoxy-2′-fluoro pyrimidine nucleotides.

19. The siNA molecule of claim 6, wherein purine nucleotides of said antisense region are 2′-O-methyl purine nucleotides.

20. The siNA molecule of claim 6, wherein purine nucleotides present in said antisense region comprise 2′-deoxy-purine nucleotides.

21. The siNA molecule of claim 18, wherein said antisense region comprises a phosphorothioate internucleotide linkage at the 3′ end of said antisense region.

22. The siNA molecule of claim 6, wherein said antisense region comprises a glyceryl modification at a 3′ end of said antisense region.

23. The siNA molecule of claim 9, wherein each of the two fragments of said siNA molecule comprise about 21 nucleotides.

24. The siNA molecule of claim 23, wherein about 19 nucleotides of each fragment of the siNA molecule are base-paired to the complementary nucleotides of the other fragment of the siNA molecule and wherein at least two 3′ terminal nucleotides of each fragment of the siNA molecule are not base-paired to the nucleotides of the other fragment of the siNA molecule.

25. The siNA molecule of claim 24, wherein each of the two 3′ terminal nucleotides of each fragment of the siNA molecule are 2′-deoxy-pyrimidines.

26. The siNA molecule of claim 25, wherein said 2′-deoxy-pyrimidine is 2′-deoxy-thymidine.

27. The siNA molecule of claim 23, wherein all of the about 21 nucleotides of each fragment of the siNA molecule are base-paired to the complementary nucleotides of the other fragment of the siNA molecule.

28. The siNA molecule of claim 23, wherein about 19 nucleotides of the antisense region are base-paired to the nucleotide sequence of the RNA encoded by a p38 gene or a portion thereof.

29. The siNA molecule of claim 23, wherein about 21 nucleotides of the antisense region are base-paired to the nucleotide sequence of the RNA encoded by a p38 gene or a portion thereof.

30. The siNA molecule of claim 9, wherein a 5′-end of the fragment comprising said antisense region optionally includes a phosphate group.

31. A composition comprising the siNA molecule of claim 1 in an pharmaceutically acceptable carrier or diluent.

32. A siNA according to claim 1 wherein the p38 RNA comprises Genbank Accession No. NM_{—}001078.

33. A siNA according to claim 1 wherein said siNA comprises any of SEQ ID NOs. 695-1112, 1499-1506, and 1825-1920.

34. A composition comprising the siNA of claim 32 together with a pharmaceutically acceptable carrier or diluent.

35. A composition comprising the siNA of claim 33 together with a pharmaceutically acceptable carrier or diluent.

The application's sequence listing, which the Patent Office published only in electronic form, follows.

SEQUENCE LISTING (2360 sequences)

SEQ ID NO: 1 - RNA, 19 nt, Artificial Sequence
  Description of Artificial Sequence:  siNA sense region
cccucccuccgcccgcccg

SEQ ID NO: 2 - RNA, 19 nt, Artificial Sequence
  Description of Artificial Sequence:  siNA sense region
gccggcccgcccgucaguc

SEQ ID NO: 3 - RNA, 19 nt, Artificial Sequence
  Description of Artificial Sequence:  siNA sense region
cuggcaggcaggcaggcaa

SEQ ID NO: 4 - RNA, 19 nt, Artificial Sequence
  Description of Artificial Sequence:  siNA sense region
aucgguccgaguggcuguc

SEQ ID NO: 5 - RNA, 19 nt, Artificial Sequence
  Description of Artificial Sequence:  siNA sense region
cggcucuucagcucucccg

SEQ ID NO: 6 - RNA, 19 nt, Artificial Sequence
  Description of Artificial Sequence:  siNA sense region
gcucggcgucuuccuuccu

SEQ ID NO: 7 - RNA, 19 nt, Artificial Sequence
  Description of Artificial Sequence:  siNA sense region
uccucccggucagcgucgg

SEQ ID NO: 8 - RNA, 19 nt, Artificial Sequence
  Description of Artificial Sequence:  siNA sense region
gcggcugcaccggcggcgg

SEQ ID NO: 9 - RNA, 19 nt, Artificial Sequence
  Description of Artificial Sequence:  siNA sense region
gcgcagucccugcgggagg

SEQ ID NO: 10 - RNA, 19 nt, Artificial Sequence
  Description of Artificial Sequence:  siNA sense region
gggcgacaagagcugagcg

SEQ ID NO: 11 - RNA, 19 nt, Artificial Sequence
  Description of Artificial Sequence:  siNA sense region
ggcggccgccgagcgucga

SEQ ID NO: 12 - RNA, 19 nt, Artificial Sequence
  Description of Artificial Sequence:  siNA sense region
agcucagcgcggcggaggc

SEQ ID NO: 13 - RNA, 19 nt, Artificial Sequence
  Description of Artificial Sequence:  siNA sense region
cggcggcggcccggcagcc

SEQ ID NO: 14 - RNA, 19 nt, Artificial Sequence
  Description of Artificial Sequence:  siNA sense region
caacauggcggcggcggcg

SEQ ID NO: 15 - RNA, 19 nt, Artificial Sequence
  Description of Artificial Sequence:  siNA sense region
ggcggcgggcgcgggcccg

SEQ ID NO: 16 - RNA, 19 nt, Artificial Sequence
  Description of Artificial Sequence:  siNA sense region
ggagaugguccgcgggcag

SEQ ID NO: 17 - RNA, 19 nt, Artificial Sequence
  Description of Artificial Sequence:  siNA sense region
gguguucgacguggggccg

SEQ ID NO: 18 - RNA, 19 nt, Artificial Sequence
  Description of Artificial Sequence:  siNA sense region
gcgcuacaccaaccucucg

SEQ ID NO: 19 - RNA, 19 nt, Artificial Sequence
  Description of Artificial Sequence:  siNA sense region
guacaucggcgagggcgcc

SEQ ID NO: 20 - RNA, 19 nt, Artificial Sequence
  Description of Artificial Sequence:  siNA sense region
cuacggcauggugugcucu

SEQ ID NO: 21 - RNA, 19 nt, Artificial Sequence
  Description of Artificial Sequence:  siNA sense region
ugcuuaugauaaugucaac

SEQ ID NO: 22 - RNA, 19 nt, Artificial Sequence
  Description of Artificial Sequence:  siNA sense region
caaaguucgaguagcuauc

SEQ ID NO: 23 - RNA, 19 nt, Artificial Sequence
  Description of Artificial Sequence:  siNA sense region
caagaaaaucagccccuuu

SEQ ID NO: 24 - RNA, 19 nt, Artificial Sequence
  Description of Artificial Sequence:  siNA sense region
ugagcaccagaccuacugc

SEQ ID NO: 25 - RNA, 19 nt, Artificial Sequence
  Description of Artificial Sequence:  siNA sense region
ccagagaacccugagggag

SEQ ID NO: 26 - RNA, 19 nt, Artificial Sequence
  Description of Artificial Sequence:  siNA sense region
gauaaaaaucuuacugcgc

SEQ ID NO: 27 - RNA, 19 nt, Artificial Sequence
  Description of Artificial Sequence:  siNA sense region
cuucagacaugagaacauc

SEQ ID NO: 28 - RNA, 19 nt, Artificial Sequence
  Description of Artificial Sequence:  siNA sense region
cauuggaaucaaugacauu

SEQ ID NO: 29 - RNA, 19 nt, Artificial Sequence
  Description of Artificial Sequence:  siNA sense region
uauucgagcaccaaccauc

SEQ ID NO: 30 - RNA, 19 nt, Artificial Sequence
  Description of Artificial Sequence:  siNA sense region
cgagcaaaugaaagaugua

SEQ ID NO: 31 - RNA, 19 nt, Artificial Sequence
  Description of Artificial Sequence:  siNA sense region
auauauaguacaggaccuc

SEQ ID NO: 32 - RNA, 19 nt, Artificial Sequence
  Description of Artificial Sequence:  siNA sense region
cauggaaacagaucuuuac

SEQ ID NO: 33 - RNA, 19 nt, Artificial Sequence
  Description of Artificial Sequence:  siNA sense region
caagcucuugaagacacaa

SEQ ID NO: 34 - RNA, 19 nt, Artificial Sequence
  Description of Artificial Sequence:  siNA sense region
acaccucagcaaugaccau

SEQ ID NO: 35 - RNA, 19 nt, Artificial Sequence
  Description of Artificial Sequence:  siNA sense region
uaucugcuauuuucucuac

SEQ ID NO: 36 - RNA, 19 nt, Artificial Sequence
  Description of Artificial Sequence:  siNA sense region
ccagauccucagaggguua

SEQ ID NO: 37 - RNA, 19 nt, Artificial Sequence
  Description of Artificial Sequence:  siNA sense region
aaaauauauccauucagcu

SEQ ID NO: 38 - RNA, 19 nt, Artificial Sequence
  Description of Artificial Sequence:  siNA sense region
uaacguucugcaccgugac

SEQ ID NO: 39 - RNA, 19 nt, Artificial Sequence
  Description of Artificial Sequence:  siNA sense region
ccucaagccuuccaaccug

SEQ ID NO: 40 - RNA, 19 nt, Artificial Sequence
  Description of Artificial Sequence:  siNA sense region
gcugcucaacaccaccugu

SEQ ID NO: 41 - RNA, 19 nt, Artificial Sequence
  Description of Artificial Sequence:  siNA sense region
ugaucucaagaucugugac

SEQ ID NO: 42 - RNA, 19 nt, Artificial Sequence
  Description of Artificial Sequence:  siNA sense region
cuuuggccuggcccguguu

SEQ ID NO: 43 - RNA, 19 nt, Artificial Sequence
  Description of Artificial Sequence:  siNA sense region
ugcagauccagaccaugau

SEQ ID NO: 44 - RNA, 19 nt, Artificial Sequence
  Description of Artificial Sequence:  siNA sense region
ucacacaggguuccugaca

SEQ ID NO: 45 - RNA, 19 nt, Artificial Sequence
  Description of Artificial Sequence:  siNA sense region
agaauauguggccacacgu

SEQ ID NO: 46 - RNA, 19 nt, Artificial Sequence
  Description of Artificial Sequence:  siNA sense region
uugguacagggcuccagaa

SEQ ID NO: 47 - RNA, 19 nt, Artificial Sequence
  Description of Artificial Sequence:  siNA sense region
aauuauguugaauuccaag

SEQ ID NO: 48 - RNA, 19 nt, Artificial Sequence
  Description of Artificial Sequence:  siNA sense region
gggcuacaccaaguccauu

SEQ ID NO: 49 - RNA, 19 nt, Artificial Sequence
  Description of Artificial Sequence:  siNA sense region
ugauauuuggucuguaggc

SEQ ID NO: 50 - RNA, 19 nt, Artificial Sequence
  Description of Artificial Sequence:  siNA sense region
cugcauucuggcagaaaug

SEQ ID NO: 51 - RNA, 19 nt, Artificial Sequence
  Description of Artificial Sequence:  siNA sense region
gcuuucuaacaggcccauc

SEQ ID NO: 52 - RNA, 19 nt, Artificial Sequence
  Description of Artificial Sequence:  siNA sense region
cuuuccagggaagcauuau

SEQ ID NO: 53 - RNA, 19 nt, Artificial Sequence
  Description of Artificial Sequence:  siNA sense region
ucuugaccagcugaaacac

SEQ ID NO: 54 - RNA, 19 nt, Artificial Sequence
  Description of Artificial Sequence:  siNA sense region
cauuuuggguauucuugga

SEQ ID NO: 55 - RNA, 19 nt, Artificial Sequence
  Description of Artificial Sequence:  siNA sense region
auccccaucacaagaagac

SEQ ID NO: 56 - RNA, 19 nt, Artificial Sequence
  Description of Artificial Sequence:  siNA sense region
ccugaauuguauaauaaau

SEQ ID NO: 57 - RNA, 19 nt, Artificial Sequence
  Description of Artificial Sequence:  siNA sense region
uuuaaaagcuaggaacuau

SEQ ID NO: 58 - RNA, 19 nt, Artificial Sequence
  Description of Artificial Sequence:  siNA sense region
uuugcuuucucuuccacac

SEQ ID NO: 59 - RNA, 19 nt, Artificial Sequence
  Description of Artificial Sequence:  siNA sense region
caaaaauaaggugccaugg

SEQ ID NO: 60 - RNA, 19 nt, Artificial Sequence
  Description of Artificial Sequence:  siNA sense region
gaacaggcuguucccaaau

SEQ ID NO: 61 - RNA, 19 nt, Artificial Sequence
  Description of Artificial Sequence:  siNA sense region
ugcugacuccaaagcucug

SEQ ID NO: 62 - RNA, 19 nt, Artificial Sequence
  Description of Artificial Sequence:  siNA sense region
ggacuuauuggacaaaaug

SEQ ID NO: 63 - RNA, 19 nt, Artificial Sequence
  Description of Artificial Sequence:  siNA sense region
guugacauucaacccacac

SEQ ID NO: 64 - RNA, 19 nt, Artificial Sequence
  Description of Artificial Sequence:  siNA sense region
caagaggauugaaguagaa

SEQ ID NO: 65 - RNA, 19 nt, Artificial Sequence
  Description of Artificial Sequence:  siNA sense region
acaggcucuggcccaccca

SEQ ID NO: 66 - RNA, 19 nt, Artificial Sequence
  Description of Artificial Sequence:  siNA sense region
auaucuggagcaguauuac

SEQ ID NO: 67 - RNA, 19 nt, Artificial Sequence
  Description of Artificial Sequence:  siNA sense region
cgacccgagugacgagccc

SEQ ID NO: 68 - RNA, 19 nt, Artificial Sequence
  Description of Artificial Sequence:  siNA sense region
caucgccgaagcaccauuc

SEQ ID NO: 69 - RNA, 19 nt, Artificial Sequence
  Description of Artificial Sequence:  siNA sense region
caaguucgacauggaauug

SEQ ID NO: 70 - RNA, 19 nt, Artificial Sequence
  Description of Artificial Sequence:  siNA sense region
ggaugacuugccuaaggaa

SEQ ID NO: 71 - RNA, 19 nt, Artificial Sequence
  Description of Artificial Sequence:  siNA sense region
aaagcucaaagaacuaauu

SEQ ID NO: 72 - RNA, 19 nt, Artificial Sequence
  Description of Artificial Sequence:  siNA sense region
uuuugaagagacugcuaga

SEQ ID NO: 73 - RNA, 19 nt, Artificial Sequence
  Description of Artificial Sequence:  siNA sense region
auuccagccaggauacaga

SEQ ID NO: 74 - RNA, 19 nt, Artificial Sequence
  Description of Artificial Sequence:  siNA sense region
aucuuaaauuugucaggac

SEQ ID NO: 75 - RNA, 19 nt, Artificial Sequence
  Description of Artificial Sequence:  siNA sense region
caagggcucagaggacugg

SEQ ID NO: 76 - RNA, 19 nt, Artificial Sequence
  Description of Artificial Sequence:  siNA sense region
gacgugcucagacaucggu

SEQ ID NO: 77 - RNA, 19 nt, Artificial Sequence
  Description of Artificial Sequence:  siNA sense region
uguucuucuucccaguucu

SEQ ID NO: 78 - RNA, 19 nt, Artificial Sequence
  Description of Artificial Sequence:  siNA sense region
uugaccccugguccugucu

SEQ ID NO: 79 - RNA, 19 nt, Artificial Sequence
  Description of Artificial Sequence:  siNA sense region
uccagcccgucuuggcuua

SEQ ID NO: 80 - RNA, 19 nt, Artificial Sequence
  Description of Artificial Sequence:  siNA sense region
auccacuuugacuccuuug

SEQ ID NO: 81 - RNA, 19 nt, Artificial Sequence
  Description of Artificial Sequence:  siNA sense region
gagccguuuggaggggcgg

SEQ ID NO: 82 - RNA, 19 nt, Artificial Sequence
  Description of Artificial Sequence:  siNA sense region
guuucugguaguuguggcu

SEQ ID NO: 83 - RNA, 19 nt, Artificial Sequence
  Description of Artificial Sequence:  siNA sense region
uuuuaugcuuucaaagaau

SEQ ID NO: 84 - RNA, 19 nt, Artificial Sequence
  Description of Artificial Sequence:  siNA sense region
uuucuucaguccagagaau

SEQ ID NO: 85 - RNA, 19 nt, Artificial Sequence
  Description of Artificial Sequence:  siNA sense region
uuccuccuggcagcccugu

SEQ ID NO: 86 - RNA, 19 nt, Artificial Sequence
  Description of Artificial Sequence:  siNA sense region
ugugugucacccauuggug

SEQ ID NO: 87 - RNA, 19 nt, Artificial Sequence
  Description of Artificial Sequence:  siNA sense region
gaccugcggcaguauguac

SEQ ID NO: 88 - RNA, 19 nt, Artificial Sequence
  Description of Artificial Sequence:  siNA sense region
cuucagugcaccuuacugc

SEQ ID NO: 89 - RNA, 19 nt, Artificial Sequence
  Description of Artificial Sequence:  siNA sense region
cuuacuguugcuuuaguca

SEQ ID NO: 90 - RNA, 19 nt, Artificial Sequence
  Description of Artificial Sequence:  siNA sense region
acuaauugcuuucugguuu

SEQ ID NO: 91 - RNA, 19 nt, Artificial Sequence
  Description of Artificial Sequence:  siNA sense region
ugaaagaugcagugguucc

SEQ ID NO: 92 - RNA, 19 nt, Artificial Sequence
  Description of Artificial Sequence:  siNA sense region
cucccucuccugaauccuu

SEQ ID NO: 93 - RNA, 19 nt, Artificial Sequence
  Description of Artificial Sequence:  siNA sense region
uuucuacaugaugcccugc

SEQ ID NO: 94 - RNA, 19 nt, Artificial Sequence
  Description of Artificial Sequence:  siNA sense region
cugaccaugcagccgcacc

SEQ ID NO: 95 - RNA, 19 nt, Artificial Sequence
  Description of Artificial Sequence:  siNA sense region
cagagagagauucuucccc

SEQ ID NO: 96 - RNA, 19 nt, Artificial Sequence
  Description of Artificial Sequence:  siNA sense region
caauuggcucuagucacug

SEQ ID NO: 97 - RNA, 19 nt, Artificial Sequence
  Description of Artificial Sequence:  siNA sense region
ggcaucucacuuuaugaua

SEQ ID NO: 98 - RNA, 19 nt, Artificial Sequence
  Description of Artificial Sequence:  siNA sense region
agggaaggcuacuaccuag

SEQ ID NO: 99 - RNA, 19 nt, Artificial Sequence
  Description of Artificial Sequence:  siNA sense region
gggcacuuuaagucaguga

SEQ ID NO: 100 - RNA, 19 nt, Artificial Sequence
  Description of Artificial Sequence:  siNA sense region
acagccccuuauuugcacu

SEQ ID NO: 101 - RNA, 19 nt, Artificial Sequence
  Description of Artificial Sequence:  siNA sense region
uucaccuuuugaccauaac

SEQ ID NO: 102 - RNA, 19 nt, Artificial Sequence
  Description of Artificial Sequence:  siNA sense region
cuguuuccccagagcagga

SEQ ID NO: 103 - RNA, 19 nt, Artificial Sequence
  Description of Artificial Sequence:  siNA sense region
agcuuguggaaauaccuug

SEQ ID NO: 104 - RNA, 19 nt, Artificial Sequence
  Description of Artificial Sequence:  siNA sense region
ggcugauguugcagccugc

SEQ ID NO: 105 - RNA, 19 nt, Artificial Sequence
  Description of Artificial Sequence:  siNA sense region
cagcaagugcuuccgucuc

SEQ ID NO: 106 - RNA, 19 nt, Artificial Sequence
  Description of Artificial Sequence:  siNA sense region
ccggaauccuuggggagca

SEQ ID NO: 107 - RNA, 19 nt, Artificial Sequence
  Description of Artificial Sequence:  siNA sense region
acuuguccacgucuuuucu

SEQ ID NO: 108 - RNA, 19 nt, Artificial Sequence
  Description of Artificial Sequence:  siNA sense region
ucauaucaugguagucacu

SEQ ID NO: 109 - RNA, 19 nt, Artificial Sequence
  Description of Artificial Sequence:  siNA sense region
uaacauauauaagguaugu

SEQ ID NO: 110 - RNA, 19 nt, Artificial Sequence
  Description of Artificial Sequence:  siNA sense region
ugcuauuggcccagcuuuu

SEQ ID NO: 111 - RNA, 19 nt, Artificial Sequence
  Description of Artificial Sequence:  siNA sense region
uagaaaaugcagucauuuu

SEQ ID NO: 112 - RNA, 19 nt, Artificial Sequence
  Description of Artificial Sequence:  siNA sense region
uucuaaauaaaaaggaagu

SEQ ID NO: 113 - RNA, 19 nt, Artificial Sequence
  Description of Artificial Sequence:  siNA sense region
uacugcacccagcaguguc

SEQ ID NO: 114 - RNA, 19 nt, Artificial Sequence
  Description of Artificial Sequence:  siNA sense region
cacucuguaguuacugugg

SEQ ID NO: 115 - RNA, 19 nt, Artificial Sequence
  Description of Artificial Sequence:  siNA sense region
gucacuuguaccauauaga

SEQ ID NO: 116 - RNA, 19 nt, Artificial Sequence
  Description of Artificial Sequence:  siNA sense region
agguguaacacuugucaag

SEQ ID NO: 117 - RNA, 19 nt, Artificial Sequence
  Description of Artificial Sequence:  siNA sense region
gaagcguuaugugcaguac

SEQ ID NO: 118 - RNA, 19 nt, Artificial Sequence
  Description of Artificial Sequence:  siNA sense region
cuuaauguuuguaagacuu

SEQ ID NO: 119 - RNA, 19 nt, Artificial Sequence
  Description of Artificial Sequence:  siNA sense region
uacaaaaaaagauuuaaag

SEQ ID NO: 120 - RNA, 19 nt, Artificial Sequence
  Description of Artificial Sequence:  siNA sense region
guggcagcuucacucgaca

SEQ ID NO: 121 - RNA, 19 nt, Artificial Sequence
  Description of Artificial Sequence:  siNA sense region
auuuggugagagaaguaca

SEQ ID NO: 122 - RNA, 19 nt, Artificial Sequence
  Description of Artificial Sequence:  siNA sense region
aaagguugcagugcugagc

SEQ ID NO: 123 - RNA, 19 nt, Artificial Sequence
  Description of Artificial Sequence:  siNA sense region
cugugggcgguuucugggg

SEQ ID NO: 124 - RNA, 19 nt, Artificial Sequence
  Description of Artificial Sequence:  siNA sense region
gaugucccaggguggaacu

SEQ ID NO: 125 - RNA, 19 nt, Artificial Sequence
  Description of Artificial Sequence:  siNA sense region
uccacaugcuggugcauau

SEQ ID NO: 126 - RNA, 19 nt, Artificial Sequence
  Description of Artificial Sequence:  siNA sense region
uacgcccuugagcuacuuc

SEQ ID NO: 127 - RNA, 19 nt, Artificial Sequence
  Description of Artificial Sequence:  siNA sense region
caaaugugguuuauaccuc

SEQ ID NO: 128 - RNA, 19 nt, Artificial Sequence
  Description of Artificial Sequence:  siNA sense region
cgcagauacaagaaucuuu

SEQ ID NO: 129 - RNA, 19 nt, Artificial Sequence
  Description of Artificial Sequence:  siNA sense region
uaugaauauacaauucuuu

SEQ ID NO: 130 - RNA, 19 nt, Artificial Sequence
  Description of Artificial Sequence:  siNA sense region
uuuccuucuacagcuuagc

SEQ ID NO: 131 - RNA, 19 nt, Artificial Sequence
  Description of Artificial Sequence:  siNA sense region
cuccgucuuuucaaccacg

SEQ ID NO: 132 - RNA, 19 nt, Artificial Sequence
  Description of Artificial Sequence:  siNA sense region
gaacauuuaaaacccgacc

SEQ ID NO: 133 - RNA, 19 nt, Artificial Sequence
  Description of Artificial Sequence:  siNA sense region
cuacuagcacuguucuguc

SEQ ID NO: 134 - RNA, 19 nt, Artificial Sequence
  Description of Artificial Sequence:  siNA sense region
ccucaaguacucaaauauu

SEQ ID NO: 135 - RNA, 19 nt, Artificial Sequence
  Description of Artificial Sequence:  siNA sense region
uucugauacugcugaguca

SEQ ID NO: 136 - RNA, 19 nt, Artificial Sequence
  Description of Artificial Sequence:  siNA sense region
agacugucagaaaaagcua

SEQ ID NO: 137 - RNA, 19 nt, Artificial Sequence
  Description of Artificial Sequence:  siNA sense region
agcacuaacucguguuugg

SEQ ID NO: 138 - RNA, 19 nt, Artificial Sequence
  Description of Artificial Sequence:  siNA sense region
gagcucuauccauauuuua

SEQ ID NO: 139 - RNA, 19 nt, Artificial Sequence
  Description of Artificial Sequence:  siNA sense region
acugaucucuuuaaguauu

SEQ ID NO: 140 - RNA, 19 nt, Artificial Sequence
  Description of Artificial Sequence:  siNA sense region
uuguuccugccacugugua

SEQ ID NO: 141 - RNA, 19 nt, Artificial Sequence
  Description of Artificial Sequence:  siNA sense region
acuguggaguugacucggu

SEQ ID NO: 142 - RNA, 19 nt, Artificial Sequence
  Description of Artificial Sequence:  siNA sense region
uguucugucccagugcggu

SEQ ID NO: 143 - RNA, 19 nt, Artificial Sequence
  Description of Artificial Sequence:  siNA sense region
ugccuccucuugacuuccc

SEQ ID NO: 144 - RNA, 19 nt, Artificial Sequence
  Description of Artificial Sequence:  siNA sense region
ccacugcucucugugguga

SEQ ID NO: 145 - RNA, 19 nt, Artificial Sequence
  Description of Artificial Sequence:  siNA sense region
agaaauuugccuuguucaa

SEQ ID NO: 146 - RNA, 19 nt, Artificial Sequence
  Description of Artificial Sequence:  siNA sense region
auaauuacuguacccucgc

SEQ ID NO: 147 - RNA, 19 nt, Artificial Sequence
  Description of Artificial Sequence:  siNA sense region
caugacuguuacagcuuuc

SEQ ID NO: 148 - RNA, 19 nt, Artificial Sequence
  Description of Artificial Sequence:  siNA sense region
cugugcagagaugacuguc

SEQ ID NO: 149 - RNA, 19 nt, Artificial Sequence
  Description of Artificial Sequence:  siNA sense region
ccaagugccacaugccuac

SEQ ID NO: 150 - RNA, 19 nt, Artificial Sequence
  Description of Artificial Sequence:  siNA sense region
cgauugaaaugaaaacucu

SEQ ID NO: 151 - RNA, 19 nt, Artificial Sequence
  Description of Artificial Sequence:  siNA sense region
uauuguuaccucugaguug

SEQ ID NO: 152 - RNA, 19 nt, Artificial Sequence
  Description of Artificial Sequence:  siNA sense region
guguuccacggaaaaugcu

SEQ ID NO: 153 - RNA, 19 nt, Artificial Sequence
  Description of Artificial Sequence:  siNA sense region
uauccagcagaucauuuag

SEQ ID NO: 154 - RNA, 19 nt, Artificial Sequence
  Description of Artificial Sequence:  siNA sense region
ggaaaaauaauucuauuuu

SEQ ID NO: 155 - RNA, 19 nt, Artificial Sequence
  Description of Artificial Sequence:  siNA sense region
uuagcuuuucauuucucag

SEQ ID NO: 156 - RNA, 19 nt, Artificial Sequence
  Description of Artificial Sequence:  siNA sense region
gcuguccuuuuuucuuguu

SEQ ID NO: 157 - RNA, 19 nt, Artificial Sequence
  Description of Artificial Sequence:  siNA sense region
uugauuuuugacagcaaug

SEQ ID NO: 158 - RNA, 19 nt, Artificial Sequence
  Description of Artificial Sequence:  siNA sense region
ggagaauggguuauauaaa

SEQ ID NO: 159 - RNA, 19 nt, Artificial Sequence
  Description of Artificial Sequence:  siNA sense region
agacugccugcuaauauga

SEQ ID NO: 160 - RNA, 19 nt, Artificial Sequence
  Description of Artificial Sequence:  siNA sense region
aacagaaaugcauuuguaa

SEQ ID NO: 161 - RNA, 19 nt, Artificial Sequence
  Description of Artificial Sequence:  siNA sense region
auucaugaaaauaaaugua

SEQ ID NO: 162 - RNA, 19 nt, Artificial Sequence
  Description of Artificial Sequence:  siNA sense region
acaucuucuaucuucaaaa

SEQ ID NO: 163 - RNA, 19 nt, Artificial Sequence
  Description of Artificial Sequence:  siNA sense region
uucaaaaaaaaaaaaaaaa

SEQ ID NO: 164 - RNA, 19 nt, Artificial Sequence
  Description of Artificial Sequence:  siNA antisense region
cgggcgggcggagggaggg

SEQ ID NO: 165 - RNA, 19 nt, Artificial Sequence
  Description of Artificial Sequence:  siNA antisense region
gacugacgggcgggccggc

SEQ ID NO: 166 - RNA, 19 nt, Artificial Sequence
  Description of Artificial Sequence:  siNA antisense region
uugccugccugccugccag

SEQ ID NO: 167 - RNA, 19 nt, Artificial Sequence
  Description of Artificial Sequence:  siNA antisense region
gacagccacucggaccgau

SEQ ID NO: 168 - RNA, 19 nt, Artificial Sequence
  Description of Artificial Sequence:  siNA antisense region
cgggagagcugaagagccg

SEQ ID NO: 169 - RNA, 19 nt, Artificial Sequence
  Description of Artificial Sequence:  siNA antisense region
aggaaggaagacgccgagc

SEQ ID NO: 170 - RNA, 19 nt, Artificial Sequence
  Description of Artificial Sequence:  siNA antisense region
ccgacgcugaccgggagga

SEQ ID NO: 171 - RNA, 19 nt, Artificial Sequence
  Description of Artificial Sequence:  siNA antisense region
ccgccgccggugcagccgc

SEQ ID NO: 172 - RNA, 19 nt, Artificial Sequence
  Description of Artificial Sequence:  siNA antisense region
ccucccgcagggacugcgc

SEQ ID NO: 173 - RNA, 19 nt, Artificial Sequence
  Description of Artificial Sequence:  siNA antisense region
cgcucagcucuugucgccc

SEQ ID NO: 174 - RNA, 19 nt, Artificial Sequence
  Description of Artificial Sequence:  siNA antisense region
ucgacgcucggcggccgcc

SEQ ID NO: 175 - RNA, 19 nt, Artificial Sequence
  Description of Artificial Sequence:  siNA antisense region
gccuccgccgcgcugagcu

SEQ ID NO: 176 - RNA, 19 nt, Artificial Sequence
  Description of Artificial Sequence:  siNA antisense region
ggcugccgggccgccgccg

SEQ ID NO: 177 - RNA, 19 nt, Artificial Sequence
  Description of Artificial Sequence:  siNA antisense region
cgccgccgccgccauguug

SEQ ID NO: 178 - RNA, 19 nt, Artificial Sequence
  Description of Artificial Sequence:  siNA antisense region
cgggcccgcgcccgccgcc

SEQ ID NO: 179 - RNA, 19 nt, Artificial Sequence
  Description of Artificial Sequence:  siNA antisense region
cugcccgcggaccaucucc

SEQ ID NO: 180 - RNA, 19 nt, Artificial Sequence
  Description of Artificial Sequence:  siNA antisense region
cggccccacgucgaacacc

SEQ ID NO: 181 - RNA, 19 nt, Artificial Sequence
  Description of Artificial Sequence:  siNA antisense region
cgagagguugguguagcgc

SEQ ID NO: 182 - RNA, 19 nt, Artificial Sequence
  Description of Artificial Sequence:  siNA antisense region
ggcgcccucgccgauguac

SEQ ID NO: 183 - RNA, 19 nt, Artificial Sequence
  Description of Artificial Sequence:  siNA antisense region
agagcacaccaugccguag

SEQ ID NO: 184 - RNA, 19 nt, Artificial Sequence
  Description of Artificial Sequence:  siNA antisense region
guugacauuaucauaagca

SEQ ID NO: 185 - RNA, 19 nt, Artificial Sequence
  Description of Artificial Sequence:  siNA antisense region
gauagcuacucgaacuuug

SEQ ID NO: 186 - RNA, 19 nt, Artificial Sequence
  Description of Artificial Sequence:  siNA antisense region
aaaggggcugauuuucuug

SEQ ID NO: 187 - RNA, 19 nt, Artificial Sequence
  Description of Artificial Sequence:  siNA antisense region
gcaguaggucuggugcuca

SEQ ID NO: 188 - RNA, 19 nt, Artificial Sequence
  Description of Artificial Sequence:  siNA antisense region
cucccucaggguucucugg

SEQ ID NO: 189 - RNA, 19 nt, Artificial Sequence
  Description of Artificial Sequence:  siNA antisense region
gcgcaguaagauuuuuauc

SEQ ID NO: 190 - RNA, 19 nt, Artificial Sequence
  Description of Artificial Sequence:  siNA antisense region
gauguucucaugucugaag

SEQ ID NO: 191 - RNA, 19 nt, Artificial Sequence
  Description of Artificial Sequence:  siNA antisense region
aaugucauugauuccaaug

SEQ ID NO: 192 - RNA, 19 nt, Artificial Sequence
  Description of Artificial Sequence:  siNA antisense region
gaugguuggugcucgaaua

SEQ ID NO: 193 - RNA, 19 nt, Artificial Sequence
  Description of Artificial Sequence:  siNA antisense region
uacaucuuucauuugcucg

SEQ ID NO: 194 - RNA, 19 nt, Artificial Sequence
  Description of Artificial Sequence:  siNA antisense region
gagguccuguacuauauau

SEQ ID NO: 195 - RNA, 19 nt, Artificial Sequence
  Description of Artificial Sequence:  siNA antisense region
guaaagaucuguuuccaug

SEQ ID NO: 196 - RNA, 19 nt, Artificial Sequence
  Description of Artificial Sequence:  siNA antisense region
uugugucuucaagagcuug

SEQ ID NO: 197 - RNA, 19 nt, Artificial Sequence
  Description of Artificial Sequence:  siNA antisense region
auggucauugcugaggugu

SEQ ID NO: 198 - RNA, 19 nt, Artificial Sequence
  Description of Artificial Sequence:  siNA antisense region
guagagaaaauagcagaua

SEQ ID NO: 199 - RNA, 19 nt, Artificial Sequence
  Description of Artificial Sequence:  siNA antisense region
uaacccucugaggaucugg

SEQ ID NO: 200 - RNA, 19 nt, Artificial Sequence
  Description of Artificial Sequence:  siNA antisense region
agcugaauggauauauuuu

SEQ ID NO: 201 - RNA, 19 nt, Artificial Sequence
  Description of Artificial Sequence:  siNA antisense region
gucacggugcagaacguua

SEQ ID NO: 202 - RNA, 19 nt, Artificial Sequence
  Description of Artificial Sequence:  siNA antisense region
cagguuggaaggcuugagg

SEQ ID NO: 203 - RNA, 19 nt, Artificial Sequence
  Description of Artificial Sequence:  siNA antisense region
acaggugguguugagcagc

SEQ ID NO: 204 - RNA, 19 nt, Artificial Sequence
  Description of Artificial Sequence:  siNA antisense region
gucacagaucuugagauca

SEQ ID NO: 205 - RNA, 19 nt, Artificial Sequence
  Description of Artificial Sequence:  siNA antisense region
aacacgggccaggccaaag

SEQ ID NO: 206 - RNA, 19 nt, Artificial Sequence
  Description of Artificial Sequence:  siNA antisense region
aucauggucuggaucugca

SEQ ID NO: 207 - RNA, 19 nt, Artificial Sequence
  Description of Artificial Sequence:  siNA antisense region
ugucaggaacccuguguga

SEQ ID NO: 208 - RNA, 19 nt, Artificial Sequence
  Description of Artificial Sequence:  siNA antisense region
acguguggccacauauucu

SEQ ID NO: 209 - RNA, 19 nt, Artificial Sequence
  Description of Artificial Sequence:  siNA antisense region
uucuggagcccuguaccaa

SEQ ID NO: 210 - RNA, 19 nt, Artificial Sequence
  Description of Artificial Sequence:  siNA antisense region
cuuggaauucaacauaauu

SEQ ID NO: 211 - RNA, 19 nt, Artificial Sequence
  Description of Artificial Sequence:  siNA antisense region
aauggacuugguguagccc

SEQ ID NO: 212 - RNA, 19 nt, Artificial Sequence
  Description of Artificial Sequence:  siNA antisense region
gccuacagaccaaauauca

SEQ ID NO: 213 - RNA, 19 nt, Artificial Sequence
  Description of Artificial Sequence:  siNA antisense region
cauuucugccagaaugcag

SEQ ID NO: 214 - RNA, 19 nt, Artificial Sequence
  Description of Artificial Sequence:  siNA antisense region
gaugggccuguuagaaagc

SEQ ID NO: 215 - RNA, 19 nt, Artificial Sequence
  Description of Artificial Sequence:  siNA antisense region
auaaugcuucccuggaaag

SEQ ID NO: 216 - RNA, 19 nt, Artificial Sequence
  Description of Artificial Sequence:  siNA antisense region
guguuucagcuggucaaga

SEQ ID NO: 217 - RNA, 19 nt, Artificial Sequence
  Description of Artificial Sequence:  siNA antisense region
uccaagaauacccaaaaug

SEQ ID NO: 218 - RNA, 19 nt, Artificial Sequence
  Description of Artificial Sequence:  siNA antisense region
gucuucuugugauggggau

SEQ ID NO: 219 - RNA, 19 nt, Artificial Sequence
  Description of Artificial Sequence:  siNA antisense region
auuuauuauacaauucagg

SEQ ID NO: 220 - RNA, 19 nt, Artificial Sequence
  Description of Artificial Sequence:  siNA antisense region
auaguuccuagcuuuuaaa

SEQ ID NO: 221 - RNA, 19 nt, Artificial Sequence
  Description of Artificial Sequence:  siNA antisense region
guguggaagagaaagcaaa

SEQ ID NO: 222 - RNA, 19 nt, Artificial Sequence
  Description of Artificial Sequence:  siNA antisense region
ccauggcaccuuauuuuug

SEQ ID NO: 223 - RNA, 19 nt, Artificial Sequence
  Description of Artificial Sequence:  siNA antisense region
auuugggaacagccuguuc

SEQ ID NO: 224 - RNA, 19 nt, Artificial Sequence
  Description of Artificial Sequence:  siNA antisense region
cagagcuuuggagucagca

SEQ ID NO: 225 - RNA, 19 nt, Artificial Sequence
  Description of Artificial Sequence:  siNA antisense region
cauuuuguccaauaagucc

SEQ ID NO: 226 - RNA, 19 nt, Artificial Sequence
  Description of Artificial Sequence:  siNA antisense region
guguggguugaaugucaac

SEQ ID NO: 227 - RNA, 19 nt, Artificial Sequence
  Description of Artificial Sequence:  siNA antisense region
uucuacuucaauccucuug

SEQ ID NO: 228 - RNA, 19 nt, Artificial Sequence
  Description of Artificial Sequence:  siNA antisense region
ugggugggccagagccugu

SEQ ID NO: 229 - RNA, 19 nt, Artificial Sequence
  Description of Artificial Sequence:  siNA antisense region
guaauacugcuccagauau

SEQ ID NO: 230 - RNA, 19 nt, Artificial Sequence
  Description of Artificial Sequence:  siNA antisense region
gggcucgucacucgggucg

SEQ ID NO: 231 - RNA, 19 nt, Artificial Sequence
  Description of Artificial Sequence:  siNA antisense region
gaauggugcuucggcgaug

SEQ ID NO: 232 - RNA, 19 nt, Artificial Sequence
  Description of Artificial Sequence:  siNA antisense region
caauuccaugucgaacuug

SEQ ID NO: 233 - RNA, 19 nt, Artificial Sequence
  Description of Artificial Sequence:  siNA antisense region
uuccuuaggcaagucaucc

SEQ ID NO: 234 - RNA, 19 nt, Artificial Sequence
  Description of Artificial Sequence:  siNA antisense region
aauuaguucuuugagcuuu

SEQ ID NO: 235 - RNA, 19 nt, Artificial Sequence
  Description of Artificial Sequence:  siNA antisense region
ucuagcagucucuucaaaa

SEQ ID NO: 236 - RNA, 19 nt, Artificial Sequence
  Description of Artificial Sequence:  siNA antisense region
ucuguauccuggcuggaau

SEQ ID NO: 237 - RNA, 19 nt, Artificial Sequence
  Description of Artificial Sequence:  siNA antisense region
guccugacaaauuuaagau

SEQ ID NO: 238 - RNA, 19 nt, Artificial Sequence
  Description of Artificial Sequence:  siNA antisense region
ccaguccucugagcccuug

SEQ ID NO: 239 - RNA, 19 nt, Artificial Sequence
  Description of Artificial Sequence:  siNA antisense region
accgaugucugagcacguc

SEQ ID NO: 240 - RNA, 19 nt, Artificial Sequence
  Description of Artificial Sequence:  siNA antisense region
agaacugggaagaagaaca

SEQ ID NO: 241 - RNA, 19 nt, Artificial Sequence
  Description of Artificial Sequence:  siNA antisense region
agacaggaccaggggucaa

SEQ ID NO: 242 - RNA, 19 nt, Artificial Sequence
  Description of Artificial Sequence:  siNA antisense region
uaagccaagacgggcugga

SEQ ID NO: 243 - RNA, 19 nt, Artificial Sequence
  Description of Artificial Sequence:  siNA antisense region
caaaggagucaaaguggau

SEQ ID NO: 244 - RNA, 19 nt, Artificial Sequence
  Description of Artificial Sequence:  siNA antisense region
ccgccccuccaaacggcuc

SEQ ID NO: 245 - RNA, 19 nt, Artificial Sequence
  Description of Artificial Sequence:  siNA antisense region
agccacaacuaccagaaac

SEQ ID NO: 246 - RNA, 19 nt, Artificial Sequence
  Description of Artificial Sequence:  siNA antisense region
auucuuugaaagcauaaaa

SEQ ID NO: 247 - RNA, 19 nt, Artificial Sequence
  Description of Artificial Sequence:  siNA antisense region
auucucuggacugaagaaa

SEQ ID NO: 248 - RNA, 19 nt, Artificial Sequence
  Description of Artificial Sequence:  siNA antisense region
acagggcugccaggaggaa

SEQ ID NO: 249 - RNA, 19 nt, Artificial Sequence
  Description of Artificial Sequence:  siNA antisense region
caccaaugggugacacaca

SEQ ID NO: 250 - RNA, 19 nt, Artificial Sequence
  Description of Artificial Sequence:  siNA antisense region
guacauacugccgcagguc

SEQ ID NO: 251 - RNA, 19 nt, Artificial Sequence
  Description of Artificial Sequence:  siNA antisense region
gcaguaaggugcacugaag

SEQ ID NO: 252 - RNA, 19 nt, Artificial Sequence
  Description of Artificial Sequence:  siNA antisense region
ugacuaaagcaacaguaag

SEQ ID NO: 253 - RNA, 19 nt, Artificial Sequence
  Description of Artificial Sequence:  siNA antisense region
aaaccagaaagcaauuagu

SEQ ID NO: 254 - RNA, 19 nt, Artificial Sequence
  Description of Artificial Sequence:  siNA antisense region
ggaaccacugcaucuuuca

SEQ ID NO: 255 - RNA, 19 nt, Artificial Sequence
  Description of Artificial Sequence:  siNA antisense region
aaggauucaggagagggag

SEQ ID NO: 256 - RNA, 19 nt, Artificial Sequence
  Description of Artificial Sequence:  siNA antisense region
gcagggcaucauguagaaa

SEQ ID NO: 257 - RNA, 19 nt, Artificial Sequence
  Description of Artificial Sequence:  siNA antisense region
ggugcggcugcauggucag

SEQ ID NO: 258 - RNA, 19 nt, Artificial Sequence
  Description of Artificial Sequence:  siNA antisense region
ggggaagaaucucucucug

SEQ ID NO: 259 - RNA, 19 nt, Artificial Sequence
  Description of Artificial Sequence:  siNA antisense region
cagugacuagagccaauug

SEQ ID NO: 260 - RNA, 19 nt, Artificial Sequence
  Description of Artificial Sequence:  siNA antisense region
uaucauaaagugagaugcc

SEQ ID NO: 261 - RNA, 19 nt, Artificial Sequence
  Description of Artificial Sequence:  siNA antisense region
cuagguaguagccuucccu

SEQ ID NO: 262 - RNA, 19 nt, Artificial Sequence
  Description of Artificial Sequence:  siNA antisense region
ucacugacuuaaagugccc

SEQ ID NO: 263 - RNA, 19 nt, Artificial Sequence
  Description of Artificial Sequence:  siNA antisense region
agugcaaauaaggggcugu

SEQ ID NO: 264 - RNA, 19 nt, Artificial Sequence
  Description of Artificial Sequence:  siNA antisense region
guuauggucaaaaggugaa

SEQ ID NO: 265 - RNA, 19 nt, Artificial Sequence
  Description of Artificial Sequence:  siNA antisense region
uccugcucuggggaaacag

SEQ ID NO: 266 - RNA, 19 nt, Artificial Sequence
  Description of Artificial Sequence:  siNA antisense region
caagguauuuccacaagcu

SEQ ID NO: 267 - RNA, 19 nt, Artificial Sequence
  Description of Artificial Sequence:  siNA antisense region
gcaggcugcaacaucagcc

SEQ ID NO: 268 - RNA, 19 nt, Artificial Sequence
  Description of Artificial Sequence:  siNA antisense region
gagacggaagcacuugcug

SEQ ID NO: 269 - RNA, 19 nt, Artificial Sequence
  Description of Artificial Sequence:  siNA antisense region
ugcuccccaaggauuccgg

SEQ ID NO: 270 - RNA, 19 nt, Artificial Sequence
  Description of Artificial Sequence:  siNA antisense region
agaaaagacguggacaagu

SEQ ID NO: 271 - RNA, 19 nt, Artificial Sequence
  Description of Artificial Sequence:  siNA antisense region
agugacuaccaugauauga

SEQ ID NO: 272 - RNA, 19 nt, Artificial Sequence
  Description of Artificial Sequence:  siNA antisense region
acauaccuuauauauguua

SEQ ID NO: 273 - RNA, 19 nt, Artificial Sequence
  Description of Artificial Sequence:  siNA antisense region
aaaagcugggccaauagca

SEQ ID NO: 274 - RNA, 19 nt, Artificial Sequence
  Description of Artificial Sequence:  siNA antisense region
aaaaugacugcauuuucua

SEQ ID NO: 275 - RNA, 19 nt, Artificial Sequence
  Description of Artificial Sequence:  siNA antisense region
acuuccuuuuuauuuagaa

SEQ ID NO: 276 - RNA, 19 nt, Artificial Sequence
  Description of Artificial Sequence:  siNA antisense region
gacacugcugggugcagua

SEQ ID NO: 277 - RNA, 19 nt, Artificial Sequence
  Description of Artificial Sequence:  siNA antisense region
ccacaguaacuacagagug

SEQ ID NO: 278 - RNA, 19 nt, Artificial Sequence
  Description of Artificial Sequence:  siNA antisense region
ucuauaugguacaagugac

SEQ ID NO: 279 - RNA, 19 nt, Artificial Sequence
  Description of Artificial Sequence:  siNA antisense region
cuugacaaguguuacaccu

SEQ ID NO: 280 - RNA, 19 nt, Artificial Sequence
  Description of Artificial Sequence:  siNA antisense region
guacugcacauaacgcuuc

SEQ ID NO: 281 - RNA, 19 nt, Artificial Sequence
  Description of Artificial Sequence:  siNA antisense region
aagucuuacaaacauuaag

SEQ ID NO: 282 - RNA, 19 nt, Artificial Sequence
  Description of Artificial Sequence:  siNA antisense region
cuuuaaaucuuuuuuugua

SEQ ID NO: 283 - RNA, 19 nt, Artificial Sequence
  Description of Artificial Sequence:  siNA antisense region
ugucgagugaagcugccac

SEQ ID NO: 284 - RNA, 19 nt, Artificial Sequence
  Description of Artificial Sequence:  siNA antisense region
uguacuucucucaccaaau

SEQ ID NO: 285 - RNA, 19 nt, Artificial Sequence
  Description of Artificial Sequence:  siNA antisense region
gcucagcacugcaaccuuu

SEQ ID NO: 286 - RNA, 19 nt, Artificial Sequence
  Description of Artificial Sequence:  siNA antisense region
ccccagaaaccgcccacag

SEQ ID NO: 287 - RNA, 19 nt, Artificial Sequence
  Description of Artificial Sequence:  siNA antisense region
aguuccacccugggacauc

SEQ ID NO: 288 - RNA, 19 nt, Artificial Sequence
  Description of Artificial Sequence:  siNA antisense region
auaugcaccagcaugugga

SEQ ID NO: 289 - RNA, 19 nt, Artificial Sequence
  Description of Artificial Sequence:  siNA antisense region
gaaguagcucaagggcgua

SEQ ID NO: 290 - RNA, 19 nt, Artificial Sequence
  Description of Artificial Sequence:  siNA antisense region
gagguauaaaccacauuug

SEQ ID NO: 291 - RNA, 19 nt, Artificial Sequence
  Description of Artificial Sequence:  siNA antisense region
aaagauucuuguaucugcg

SEQ ID NO: 292 - RNA, 19 nt, Artificial Sequence
  Description of Artificial Sequence:  siNA antisense region
aaagaauuguauauucaua

SEQ ID NO: 293 - RNA, 19 nt, Artificial Sequence
  Description of Artificial Sequence:  siNA antisense region
gcuaagcuguagaaggaaa

SEQ ID NO: 294 - RNA, 19 nt, Artificial Sequence
  Description of Artificial Sequence:  siNA antisense region
cgugguugaaaagacggag

SEQ ID NO: 295 - RNA, 19 nt, Artificial Sequence
  Description of Artificial Sequence:  siNA antisense region
ggucggguuuuaaauguuc

SEQ ID NO: 296 - RNA, 19 nt, Artificial Sequence
  Description of Artificial Sequence:  siNA antisense region
gacagaacagugcuaguag

SEQ ID NO: 297 - RNA, 19 nt, Artificial Sequence
  Description of Artificial Sequence:  siNA antisense region
aauauuugaguacuugagg

SEQ ID NO: 298 - RNA, 19 nt, Artificial Sequence
  Description of Artificial Sequence:  siNA antisense region
ugacucagcaguaucagaa

SEQ ID NO: 299 - RNA, 19 nt, Artificial Sequence
  Description of Artificial Sequence:  siNA antisense region
uagcuuuuucugacagucu

SEQ ID NO: 300 - RNA, 19 nt, Artificial Sequence
  Description of Artificial Sequence:  siNA antisense region
ccaaacacgaguuagugcu

SEQ ID NO: 301 - RNA, 19 nt, Artificial Sequence
  Description of Artificial Sequence:  siNA antisense region
uaaaauauggauagagcuc

SEQ ID NO: 302 - RNA, 19 nt, Artificial Sequence
  Description of Artificial Sequence:  siNA antisense region
aauacuuaaagagaucagu

SEQ ID NO: 303 - RNA, 19 nt, Artificial Sequence
  Description of Artificial Sequence:  siNA antisense region
uacacaguggcaggaacaa

SEQ ID NO: 304 - RNA, 19 nt, Artificial Sequence
  Description of Artificial Sequence:  siNA antisense region
accgagucaacuccacagu

SEQ ID NO: 305 - RNA, 19 nt, Artificial Sequence
  Description of Artificial Sequence:  siNA antisense region
accgcacugggacagaaca

SEQ ID NO: 306 - RNA, 19 nt, Artificial Sequence
  Description of Artificial Sequence:  siNA antisense region
gggaagucaagaggaggca

SEQ ID NO: 307 - RNA, 19 nt, Artificial Sequence
  Description of Artificial Sequence:  siNA antisense region
ucaccacagagagcagugg

SEQ ID NO: 308 - RNA, 19 nt, Artificial Sequence
  Description of Artificial Sequence:  siNA antisense region
uugaacaaggcaaauuucu

SEQ ID NO: 309 - RNA, 19 nt, Artificial Sequence
  Description of Artificial Sequence:  siNA antisense region
gcgaggguacaguaauuau

SEQ ID NO: 310 - RNA, 19 nt, Artificial Sequence
  Description of Artificial Sequence:  siNA antisense region
gaaagcuguaacagucaug

SEQ ID NO: 311 - RNA, 19 nt, Artificial Sequence
  Description of Artificial Sequence:  siNA antisense region
gacagucaucucugcacag

SEQ ID NO: 312 - RNA, 19 nt, Artificial Sequence
  Description of Artificial Sequence:  siNA antisense region
guaggcauguggcacuugg

SEQ ID NO: 313 - RNA, 19 nt, Artificial Sequence
  Description of Artificial Sequence:  siNA antisense region
agaguuuucauuucaaucg

SEQ ID NO: 314 - RNA, 19 nt, Artificial Sequence
  Description of Artificial Sequence:  siNA antisense region
caacucagagguaacaaua

SEQ ID NO: 315 - RNA, 19 nt, Artificial Sequence
  Description of Artificial Sequence:  siNA antisense region
agcauuuuccguggaacac

SEQ ID NO: 316 - RNA, 19 nt, Artificial Sequence
  Description of Artificial Sequence:  siNA antisense region
cuaaaugaucugcuggaua

SEQ ID NO: 317 - RNA, 19 nt, Artificial Sequence
  Description of Artificial Sequence:  siNA antisense region
aaaauagaauuauuuuucc

SEQ ID NO: 318 - RNA, 19 nt, Artificial Sequence
  Description of Artificial Sequence:  siNA antisense region
cugagaaaugaaaagcuaa

SEQ ID NO: 319 - RNA, 19 nt, Artificial Sequence
  Description of Artificial Sequence:  siNA antisense region
aacaagaaaaaaggacagc

SEQ ID NO: 320 - RNA, 19 nt, Artificial Sequence
  Description of Artificial Sequence:  siNA antisense region
cauugcugucaaaaaucaa

SEQ ID NO: 321 - RNA, 19 nt, Artificial Sequence
  Description of Artificial Sequence:  siNA antisense region
uuuauauaacccauucucc

SEQ ID NO: 322 - RNA, 19 nt, Artificial Sequence
  Description of Artificial Sequence:  siNA antisense region
ucauauuagcaggcagucu

SEQ ID NO: 323 - RNA, 19 nt, Artificial Sequence
  Description of Artificial Sequence:  siNA antisense region
uuacaaaugcauuucuguu

SEQ ID NO: 324 - RNA, 19 nt, Artificial Sequence
  Description of Artificial Sequence:  siNA antisense region
uacauuuauuuucaugaau

SEQ ID NO: 325 - RNA, 19 nt, Artificial Sequence
  Description of Artificial Sequence:  siNA antisense region
uuuugaagauagaagaugu

SEQ ID NO: 326 - RNA, 19 nt, Artificial Sequence
  Description of Artificial Sequence:  siNA antisense region
uuuuuuuuuuuuuuuugaa

SEQ ID NO: 327 - RNA, 19 nt, Artificial Sequence
  Description of Artificial Sequence:  siNA sense region
cggggccucgggcggggcc

SEQ ID NO: 328 - RNA, 19 nt, Artificial Sequence
  Description of Artificial Sequence:  siNA sense region
cgccguggggaggagggcg

SEQ ID NO: 329 - RNA, 19 nt, Artificial Sequence
  Description of Artificial Sequence:  siNA sense region
ggugggaggggaggagugg

SEQ ID NO: 330 - RNA, 19 nt, Artificial Sequence
  Description of Artificial Sequence:  siNA sense region
gagauggcggcggcggcgg

SEQ ID NO: 331 - RNA, 19 nt, Artificial Sequence
  Description of Artificial Sequence:  siNA sense region
gcucaggggggcgggggcg

SEQ ID NO: 332 - RNA, 19 nt, Artificial Sequence
  Description of Artificial Sequence:  siNA sense region
ggggagccccguagaaccg

SEQ ID NO: 333 - RNA, 19 nt, Artificial Sequence
  Description of Artificial Sequence:  siNA sense region
gagggggucggcccggggg

SEQ ID NO: 334 - RNA, 19 nt, Artificial Sequence
  Description of Artificial Sequence:  siNA sense region
gucccgggggagguggaga

SEQ ID NO: 335 - RNA, 19 nt, Artificial Sequence
  Description of Artificial Sequence:  siNA sense region
auggugaaggggcagccgu

SEQ ID NO: 336 - RNA, 19 nt, Artificial Sequence
  Description of Artificial Sequence:  siNA sense region
uucgacgugggcccgcgcu

SEQ ID NO: 337 - RNA, 19 nt, Artificial Sequence
  Description of Artificial Sequence:  siNA sense region
uacacgcaguugcaguaca

SEQ ID NO: 338 - RNA, 19 nt, Artificial Sequence
  Description of Artificial Sequence:  siNA sense region
aucggcgagggcgcguacg

SEQ ID NO: 339 - RNA, 19 nt, Artificial Sequence
  Description of Artificial Sequence:  siNA sense region
ggcauggucagcucggccu

SEQ ID NO: 340 - RNA, 19 nt, Artificial Sequence
  Description of Artificial Sequence:  siNA sense region
uaugaccacgugcgcaaga

SEQ ID NO: 341 - RNA, 19 nt, Artificial Sequence
  Description of Artificial Sequence:  siNA sense region
acucgcguggccaucaaga

SEQ ID NO: 342 - RNA, 19 nt, Artificial Sequence
  Description of Artificial Sequence:  siNA sense region
aagaucagccccuucgaac

SEQ ID NO: 343 - RNA, 19 nt, Artificial Sequence
  Description of Artificial Sequence:  siNA sense region
caucagaccuacugccagc

SEQ ID NO: 344 - RNA, 19 nt, Artificial Sequence
  Description of Artificial Sequence:  siNA sense region
cgcacgcuccgggagaucc

SEQ ID NO: 345 - RNA, 19 nt, Artificial Sequence
  Description of Artificial Sequence:  siNA sense region
cagauccugcugcgcuucc

SEQ ID NO: 346 - RNA, 19 nt, Artificial Sequence
  Description of Artificial Sequence:  siNA sense region
cgccaugagaaugucaucg

SEQ ID NO: 347 - RNA, 19 nt, Artificial Sequence
  Description of Artificial Sequence:  siNA sense region
ggcauccgagacauucugc

SEQ ID NO: 348 - RNA, 19 nt, Artificial Sequence
  Description of Artificial Sequence:  siNA sense region
cgggcguccacccuggaag

SEQ ID NO: 349 - RNA, 19 nt, Artificial Sequence
  Description of Artificial Sequence:  siNA sense region
gccaugagagaugucuaca

SEQ ID NO: 350 - RNA, 19 nt, Artificial Sequence
  Description of Artificial Sequence:  siNA sense region
auugugcaggaccugaugg

SEQ ID NO: 351 - RNA, 19 nt, Artificial Sequence
  Description of Artificial Sequence:  siNA sense region
gagacugaccuguacaagu

SEQ ID NO: 352 - RNA, 19 nt, Artificial Sequence
  Description of Artificial Sequence:  siNA sense region
uugcugaaaagccagcagc

SEQ ID NO: 353 - RNA, 19 nt, Artificial Sequence
  Description of Artificial Sequence:  siNA sense region
cugagcaaugaccauaucu

SEQ ID NO: 354 - RNA, 19 nt, Artificial Sequence
  Description of Artificial Sequence:  siNA sense region
ugcuacuuccucuaccaga

SEQ ID NO: 355 - RNA, 19 nt, Artificial Sequence
  Description of Artificial Sequence:  siNA sense region
auccugcggggccucaagu

SEQ ID NO: 356 - RNA, 19 nt, Artificial Sequence
  Description of Artificial Sequence:  siNA sense region
uacauccacuccgccaacg

SEQ ID NO: 357 - RNA, 19 nt, Artificial Sequence
  Description of Artificial Sequence:  siNA sense region
gugcuccaccgagaucuaa

SEQ ID NO: 358 - RNA, 19 nt, Artificial Sequence
  Description of Artificial Sequence:  siNA sense region
aagcccuccaaccugcuca

SEQ ID NO: 359 - RNA, 19 nt, Artificial Sequence
  Description of Artificial Sequence:  siNA sense region
aucaacaccaccugcgacc

SEQ ID NO: 360 - RNA, 19 nt, Artificial Sequence
  Description of Artificial Sequence:  siNA sense region
cuuaagauuugugauuucg

SEQ ID NO: 361 - RNA, 19 nt, Artificial Sequence
  Description of Artificial Sequence:  siNA sense region
ggccuggcccggauugccg

SEQ ID NO: 362 - RNA, 19 nt, Artificial Sequence
  Description of Artificial Sequence:  siNA sense region
gauccugagcaugaccaca

SEQ ID NO: 363 - RNA, 19 nt, Artificial Sequence
  Description of Artificial Sequence:  siNA sense region
accggcuuccugacggagu

SEQ ID NO: 364 - RNA, 19 nt, Artificial Sequence
  Description of Artificial Sequence:  siNA sense region
uauguggcuacgcgcuggu

SEQ ID NO: 365 - RNA, 19 nt, Artificial Sequence
  Description of Artificial Sequence:  siNA sense region
uaccgggccccagagauca

SEQ ID NO: 366 - RNA, 19 nt, Artificial Sequence
  Description of Artificial Sequence:  siNA sense region
augcugaacuccaagggcu

SEQ ID NO: 367 - RNA, 19 nt, Artificial Sequence
  Description of Artificial Sequence:  siNA sense region
uauaccaaguccaucgaca

SEQ ID NO: 368 - RNA, 19 nt, Artificial Sequence
  Description of Artificial Sequence:  siNA sense region
aucuggucugugggcugca

SEQ ID NO: 369 - RNA, 19 nt, Artificial Sequence
  Description of Artificial Sequence:  siNA sense region
auucuggcugagaugcucu

SEQ ID NO: 370 - RNA, 19 nt, Artificial Sequence
  Description of Artificial Sequence:  siNA sense region
ucuaaccggcccaucuucc

SEQ ID NO: 371 - RNA, 19 nt, Artificial Sequence
  Description of Artificial Sequence:  siNA sense region
ccuggcaagcacuaccugg

SEQ ID NO: 372 - RNA, 19 nt, Artificial Sequence
  Description of Artificial Sequence:  siNA sense region
gaucagcucaaccacauuc

SEQ ID NO: 373 - RNA, 19 nt, Artificial Sequence
  Description of Artificial Sequence:  siNA sense region
cugggcauccugggcuccc

SEQ ID NO: 374 - RNA, 19 nt, Artificial Sequence
  Description of Artificial Sequence:  siNA sense region
ccaucccaggaggaccuga

SEQ ID NO: 375 - RNA, 19 nt, Artificial Sequence
  Description of Artificial Sequence:  siNA sense region
aauuguaucaucaacauga

SEQ ID NO: 376 - RNA, 19 nt, Artificial Sequence
  Description of Artificial Sequence:  siNA sense region
aaggcccgaaacuaccuac

SEQ ID NO: 377 - RNA, 19 nt, Artificial Sequence
  Description of Artificial Sequence:  siNA sense region
cagucucugcccuccaaga

SEQ ID NO: 378 - RNA, 19 nt, Artificial Sequence
  Description of Artificial Sequence:  siNA sense region
accaagguggcuugggcca

SEQ ID NO: 379 - RNA, 19 nt, Artificial Sequence
  Description of Artificial Sequence:  siNA sense region
aagcuuuuccccaagucag

SEQ ID NO: 380 - RNA, 19 nt, Artificial Sequence
  Description of Artificial Sequence:  siNA sense region
gacuccaaagcccuugacc

SEQ ID NO: 381 - RNA, 19 nt, Artificial Sequence
  Description of Artificial Sequence:  siNA sense region
cugcuggaccggauguuaa

SEQ ID NO: 382 - RNA, 19 nt, Artificial Sequence
  Description of Artificial Sequence:  siNA sense region
accuuuaaccccaauaaac

SEQ ID NO: 383 - RNA, 19 nt, Artificial Sequence
  Description of Artificial Sequence:  siNA sense region
cggaucacaguggaggaag

SEQ ID NO: 384 - RNA, 19 nt, Artificial Sequence
  Description of Artificial Sequence:  siNA sense region
gcgcuggcucaccccuacc

SEQ ID NO: 385 - RNA, 19 nt, Artificial Sequence
  Description of Artificial Sequence:  siNA sense region
cuggagcaguacuaugacc

SEQ ID NO: 386 - RNA, 19 nt, Artificial Sequence
  Description of Artificial Sequence:  siNA sense region
ccgacggaugagccagugg

SEQ ID NO: 387 - RNA, 19 nt, Artificial Sequence
  Description of Artificial Sequence:  siNA sense region
gccgaggagcccuucaccu

SEQ ID NO: 388 - RNA, 19 nt, Artificial Sequence
  Description of Artificial Sequence:  siNA sense region
uucgccauggagcuggaug

SEQ ID NO: 389 - RNA, 19 nt, Artificial Sequence
  Description of Artificial Sequence:  siNA sense region
gaccuaccuaaggagcggc

SEQ ID NO: 390 - RNA, 19 nt, Artificial Sequence
  Description of Artificial Sequence:  siNA sense region
cugaaggagcucaucuucc

SEQ ID NO: 391 - RNA, 19 nt, Artificial Sequence
  Description of Artificial Sequence:  siNA sense region
caggagacagcacgcuucc

SEQ ID NO: 392 - RNA, 19 nt, Artificial Sequence
  Description of Artificial Sequence:  siNA sense region
cagcccggagugcuggagg

SEQ ID NO: 393 - RNA, 19 nt, Artificial Sequence
  Description of Artificial Sequence:  siNA sense region
gcccccuagcccagacaga

SEQ ID NO: 394 - RNA, 19 nt, Artificial Sequence
  Description of Artificial Sequence:  siNA sense region
acaucucugcacccugggg

SEQ ID NO: 395 - RNA, 19 nt, Artificial Sequence
  Description of Artificial Sequence:  siNA sense region
gccuggaacagaacuggca

SEQ ID NO: 396 - RNA, 19 nt, Artificial Sequence
  Description of Artificial Sequence:  siNA sense region
aaagaggcaagaggucacu

SEQ ID NO: 397 - RNA, 19 nt, Artificial Sequence
  Description of Artificial Sequence:  siNA sense region
ugagggccucugucaccca

SEQ ID NO: 398 - RNA, 19 nt, Artificial Sequence
  Description of Artificial Sequence:  siNA sense region
aggaccugccuccugccug

SEQ ID NO: 399 - RNA, 19 nt, Artificial Sequence
  Description of Artificial Sequence:  siNA sense region
gccccucucccgccagacu

SEQ ID NO: 400 - RNA, 19 nt, Artificial Sequence
  Description of Artificial Sequence:  siNA sense region
uguuagaaaauggacacug

SEQ ID NO: 401 - RNA, 19 nt, Artificial Sequence
  Description of Artificial Sequence:  siNA sense region
gugcccagcccggaccuug

SEQ ID NO: 402 - RNA, 19 nt, Artificial Sequence
  Description of Artificial Sequence:  siNA sense region
ggcagcccaggccggggug

SEQ ID NO: 403 - RNA, 19 nt, Artificial Sequence
  Description of Artificial Sequence:  siNA sense region
ggagcaugggccuggccac

SEQ ID NO: 404 - RNA, 19 nt, Artificial Sequence
  Description of Artificial Sequence:  siNA sense region
ccucucuccuuugcugagg

SEQ ID NO: 405 - RNA, 19 nt, Artificial Sequence
  Description of Artificial Sequence:  siNA sense region
gccuccagcuucaggcagg

SEQ ID NO: 406 - RNA, 19 nt, Artificial Sequence
  Description of Artificial Sequence:  siNA sense region
gccaaggccuucuccuccc

SEQ ID NO: 407 - RNA, 19 nt, Artificial Sequence
  Description of Artificial Sequence:  siNA sense region
ccacccgcccuccccacgg

SEQ ID NO: 408 - RNA, 19 nt, Artificial Sequence
  Description of Artificial Sequence:  siNA sense region
gggccucgggaccucaggu

SEQ ID NO: 409 - RNA, 19 nt, Artificial Sequence
  Description of Artificial Sequence:  siNA sense region
uggccccaguucaaucucc

SEQ ID NO: 410 - RNA, 19 nt, Artificial Sequence
  Description of Artificial Sequence:  siNA sense region
ccgcugcugcugcugcgcc

SEQ ID NO: 411 - RNA, 19 nt, Artificial Sequence
  Description of Artificial Sequence:  siNA sense region
ccuuaccuuccccagcguc

SEQ ID NO: 412 - RNA, 19 nt, Artificial Sequence
  Description of Artificial Sequence:  siNA sense region
cccagucucuggcaguucu

SEQ ID NO: 413 - RNA, 19 nt, Artificial Sequence
  Description of Artificial Sequence:  siNA sense region
uggaauggaaggguucugg

SEQ ID NO: 414 - RNA, 19 nt, Artificial Sequence
  Description of Artificial Sequence:  siNA sense region
gcugccccaaccugcugaa

SEQ ID NO: 415 - RNA, 19 nt, Artificial Sequence
  Description of Artificial Sequence:  siNA sense region
agggcagagguggagggug

SEQ ID NO: 416 - RNA, 19 nt, Artificial Sequence
  Description of Artificial Sequence:  siNA sense region
ggggggcgcugaguaggga

SEQ ID NO: 417 - RNA, 19 nt, Artificial Sequence
  Description of Artificial Sequence:  siNA sense region
acucagggccaugccugcc

SEQ ID NO: 418 - RNA, 19 nt, Artificial Sequence
  Description of Artificial Sequence:  siNA sense region
cccccucaucucauucaaa

SEQ ID NO: 419 - RNA, 19 nt, Artificial Sequence
  Description of Artificial Sequence:  siNA sense region
accccacccuaguuucccu

SEQ ID NO: 420 - RNA, 19 nt, Artificial Sequence
  Description of Artificial Sequence:  siNA sense region
ugaaggaacauuccuuagu

SEQ ID NO: 421 - RNA, 19 nt, Artificial Sequence
  Description of Artificial Sequence:  siNA sense region
ucucaagggcuagcauccc

SEQ ID NO: 422 - RNA, 19 nt, Artificial Sequence
  Description of Artificial Sequence:  siNA sense region
cugaggagccaggccgggc

SEQ ID NO: 423 - RNA, 19 nt, Artificial Sequence
  Description of Artificial Sequence:  siNA sense region
ccgaauccccucccuguca

SEQ ID NO: 424 - RNA, 19 nt, Artificial Sequence
  Description of Artificial Sequence:  siNA sense region
aaagcugucacuucgcgug

SEQ ID NO: 425 - RNA, 19 nt, Artificial Sequence
  Description of Artificial Sequence:  siNA sense region
gcccucgcugcuucugugu

SEQ ID NO: 426 - RNA, 19 nt, Artificial Sequence
  Description of Artificial Sequence:  siNA sense region
uguggugagcagaagugga

SEQ ID NO: 427 - RNA, 19 nt, Artificial Sequence
  Description of Artificial Sequence:  siNA sense region
agcuggggggcguggagag

SEQ ID NO: 428 - RNA, 19 nt, Artificial Sequence
  Description of Artificial Sequence:  siNA sense region
gcccggcgccccugccacc

SEQ ID NO: 429 - RNA, 19 nt, Artificial Sequence
  Description of Artificial Sequence:  siNA sense region
cucccugacccgucuaaua

SEQ ID NO: 430 - RNA, 19 nt, Artificial Sequence
  Description of Artificial Sequence:  siNA sense region
auauaaauauagagaugug

SEQ ID NO: 431 - RNA, 19 nt, Artificial Sequence
  Description of Artificial Sequence:  siNA sense region
auagagaugugucuauggc

SEQ ID NO: 432 - RNA, 19 nt, Artificial Sequence
  Description of Artificial Sequence:  siNA antisense region
ggccccgcccgaggccccg

SEQ ID NO: 433 - RNA, 19 nt, Artificial Sequence
  Description of Artificial Sequence:  siNA antisense region
cgcccuccuccccacggcg

SEQ ID NO: 434 - RNA, 19 nt, Artificial Sequence
  Description of Artificial Sequence:  siNA antisense region
ccacuccuccccucccacc

SEQ ID NO: 435 - RNA, 19 nt, Artificial Sequence
  Description of Artificial Sequence:  siNA antisense region
ccgccgccgccgccaucuc

SEQ ID NO: 436 - RNA, 19 nt, Artificial Sequence
  Description of Artificial Sequence:  siNA antisense region
cgcccccgccccccugagc

SEQ ID NO: 437 - RNA, 19 nt, Artificial Sequence
  Description of Artificial Sequence:  siNA antisense region
cgguucuacggggcucccc

SEQ ID NO: 438 - RNA, 19 nt, Artificial Sequence
  Description of Artificial Sequence:  siNA antisense region
cccccgggccgacccccuc

SEQ ID NO: 439 - RNA, 19 nt, Artificial Sequence
  Description of Artificial Sequence:  siNA antisense region
ucuccaccucccccgggac

SEQ ID NO: 440 - RNA, 19 nt, Artificial Sequence
  Description of Artificial Sequence:  siNA antisense region
acggcugccccuucaccau

SEQ ID NO: 441 - RNA, 19 nt, Artificial Sequence
  Description of Artificial Sequence:  siNA antisense region
agcgcgggcccacgucgaa

SEQ ID NO: 442 - RNA, 19 nt, Artificial Sequence
  Description of Artificial Sequence:  siNA antisense region
uguacugcaacugcgugua

SEQ ID NO: 443 - RNA, 19 nt, Artificial Sequence
  Description of Artificial Sequence:  siNA antisense region
cguacgcgcccucgccgau

SEQ ID NO: 444 - RNA, 19 nt, Artificial Sequence
  Description of Artificial Sequence:  siNA antisense region
aggccgagcugaccaugcc

SEQ ID NO: 445 - RNA, 19 nt, Artificial Sequence
  Description of Artificial Sequence:  siNA antisense region
ucuugcgcacguggucaua

SEQ ID NO: 446 - RNA, 19 nt, Artificial Sequence
  Description of Artificial Sequence:  siNA antisense region
ucuugauggccacgcgagu

SEQ ID NO: 447 - RNA, 19 nt, Artificial Sequence
  Description of Artificial Sequence:  siNA antisense region
guucgaaggggcugaucuu

SEQ ID NO: 448 - RNA, 19 nt, Artificial Sequence
  Description of Artificial Sequence:  siNA antisense region
gcuggcaguaggucugaug

SEQ ID NO: 449 - RNA, 19 nt, Artificial Sequence
  Description of Artificial Sequence:  siNA antisense region
ggaucucccggagcgugcg

SEQ ID NO: 450 - RNA, 19 nt, Artificial Sequence
  Description of Artificial Sequence:  siNA antisense region
ggaagcgcagcaggaucug

SEQ ID NO: 451 - RNA, 19 nt, Artificial Sequence
  Description of Artificial Sequence:  siNA antisense region
cgaugacauucucauggcg

SEQ ID NO: 452 - RNA, 19 nt, Artificial Sequence
  Description of Artificial Sequence:  siNA antisense region
gcagaaugucucggaugcc

SEQ ID NO: 453 - RNA, 19 nt, Artificial Sequence
  Description of Artificial Sequence:  siNA antisense region
cuuccaggguggacgcccg

SEQ ID NO: 454 - RNA, 19 nt, Artificial Sequence
  Description of Artificial Sequence:  siNA antisense region
uguagacaucucucauggc

SEQ ID NO: 455 - RNA, 19 nt, Artificial Sequence
  Description of Artificial Sequence:  siNA antisense region
ccaucagguccugcacaau

SEQ ID NO: 456 - RNA, 19 nt, Artificial Sequence
  Description of Artificial Sequence:  siNA antisense region
acuuguacaggucagucuc

SEQ ID NO: 457 - RNA, 19 nt, Artificial Sequence
  Description of Artificial Sequence:  siNA antisense region
gcugcuggcuuuucagcaa

SEQ ID NO: 458 - RNA, 19 nt, Artificial Sequence
  Description of Artificial Sequence:  siNA antisense region
agauauggucauugcucag

SEQ ID NO: 459 - RNA, 19 nt, Artificial Sequence
  Description of Artificial Sequence:  siNA antisense region
ucugguagaggaaguagca

SEQ ID NO: 460 - RNA, 19 nt, Artificial Sequence
  Description of Artificial Sequence:  siNA antisense region
acuugaggccccgcaggau

SEQ ID NO: 461 - RNA, 19 nt, Artificial Sequence
  Description of Artificial Sequence:  siNA antisense region
cguuggcggaguggaugua

SEQ ID NO: 462 - RNA, 19 nt, Artificial Sequence
  Description of Artificial Sequence:  siNA antisense region
uuagaucucgguggagcac

SEQ ID NO: 463 - RNA, 19 nt, Artificial Sequence
  Description of Artificial Sequence:  siNA antisense region
ugagcagguuggagggcuu

SEQ ID NO: 464 - RNA, 19 nt, Artificial Sequence
  Description of Artificial Sequence:  siNA antisense region
ggucgcaggugguguugau

SEQ ID NO: 465 - RNA, 19 nt, Artificial Sequence
  Description of Artificial Sequence:  siNA antisense region
cgaaaucacaaaucuuaag

SEQ ID NO: 466 - RNA, 19 nt, Artificial Sequence
  Description of Artificial Sequence:  siNA antisense region
cggcaauccgggccaggcc

SEQ ID NO: 467 - RNA, 19 nt, Artificial Sequence
  Description of Artificial Sequence:  siNA antisense region
uguggucaugcucaggauc

SEQ ID NO: 468 - RNA, 19 nt, Artificial Sequence
  Description of Artificial Sequence:  siNA antisense region
acuccgucaggaagccggu

SEQ ID NO: 469 - RNA, 19 nt, Artificial Sequence
  Description of Artificial Sequence:  siNA antisense region
accagcgcguagccacaua

SEQ ID NO: 470 - RNA, 19 nt, Artificial Sequence
  Description of Artificial Sequence:  siNA antisense region
ugaucucuggggcccggua

SEQ ID NO: 471 - RNA, 19 nt, Artificial Sequence
  Description of Artificial Sequence:  siNA antisense region
agcccuuggaguucagcau

SEQ ID NO: 472 - RNA, 19 nt, Artificial Sequence
  Description of Artificial Sequence:  siNA antisense region
ugucgauggacuugguaua

SEQ ID NO: 473 - RNA, 19 nt, Artificial Sequence
  Description of Artificial Sequence:  siNA antisense region
ugcagcccacagaccagau

SEQ ID NO: 474 - RNA, 19 nt, Artificial Sequence
  Description of Artificial Sequence:  siNA antisense region
agagcaucucagccagaau

SEQ ID NO: 475 - RNA, 19 nt, Artificial Sequence
  Description of Artificial Sequence:  siNA antisense region
ggaagaugggccgguuaga

SEQ ID NO: 476 - RNA, 19 nt, Artificial Sequence
  Description of Artificial Sequence:  siNA antisense region
ccagguagugcuugccagg

SEQ ID NO: 477 - RNA, 19 nt, Artificial Sequence
  Description of Artificial Sequence:  siNA antisense region
gaaugugguugagcugauc

SEQ ID NO: 478 - RNA, 19 nt, Artificial Sequence
  Description of Artificial Sequence:  siNA antisense region
gggagcccaggaugcccag

SEQ ID NO: 479 - RNA, 19 nt, Artificial Sequence
  Description of Artificial Sequence:  siNA antisense region
ucagguccuccugggaugg

SEQ ID NO: 480 - RNA, 19 nt, Artificial Sequence
  Description of Artificial Sequence:  siNA antisense region
ucauguugaugauacaauu

SEQ ID NO: 481 - RNA, 19 nt, Artificial Sequence
  Description of Artificial Sequence:  siNA antisense region
guagguaguuucgggccuu

SEQ ID NO: 482 - RNA, 19 nt, Artificial Sequence
  Description of Artificial Sequence:  siNA antisense region
ucuuggagggcagagacug

SEQ ID NO: 483 - RNA, 19 nt, Artificial Sequence
  Description of Artificial Sequence:  siNA antisense region
uggcccaagccaccuuggu

SEQ ID NO: 484 - RNA, 19 nt, Artificial Sequence
  Description of Artificial Sequence:  siNA antisense region
cugacuuggggaaaagcuu

SEQ ID NO: 485 - RNA, 19 nt, Artificial Sequence
  Description of Artificial Sequence:  siNA antisense region
ggucaagggcuuuggaguc

SEQ ID NO: 486 - RNA, 19 nt, Artificial Sequence
  Description of Artificial Sequence:  siNA antisense region
uuaacauccgguccagcag

SEQ ID NO: 487 - RNA, 19 nt, Artificial Sequence
  Description of Artificial Sequence:  siNA antisense region
guuuauugggguuaaaggu

SEQ ID NO: 488 - RNA, 19 nt, Artificial Sequence
  Description of Artificial Sequence:  siNA antisense region
cuuccuccacugugauccg

SEQ ID NO: 489 - RNA, 19 nt, Artificial Sequence
  Description of Artificial Sequence:  siNA antisense region
gguaggggugagccagcgc

SEQ ID NO: 490 - RNA, 19 nt, Artificial Sequence
  Description of Artificial Sequence:  siNA antisense region
ggucauaguacugcuccag

SEQ ID NO: 491 - RNA, 19 nt, Artificial Sequence
  Description of Artificial Sequence:  siNA antisense region
ccacuggcucauccgucgg

SEQ ID NO: 492 - RNA, 19 nt, Artificial Sequence
  Description of Artificial Sequence:  siNA antisense region
aggugaagggcuccucggc

SEQ ID NO: 493 - RNA, 19 nt, Artificial Sequence
  Description of Artificial Sequence:  siNA antisense region
cauccagcuccauggcgaa

SEQ ID NO: 494 - RNA, 19 nt, Artificial Sequence
  Description of Artificial Sequence:  siNA antisense region
gccgcuccuuagguagguc

SEQ ID NO: 495 - RNA, 19 nt, Artificial Sequence
  Description of Artificial Sequence:  siNA antisense region
ggaagaugagcuccuucag

SEQ ID NO: 496 - RNA, 19 nt, Artificial Sequence
  Description of Artificial Sequence:  siNA antisense region
ggaagcgugcugucuccug

SEQ ID NO: 497 - RNA, 19 nt, Artificial Sequence
  Description of Artificial Sequence:  siNA antisense region
ccuccagcacuccgggcug

SEQ ID NO: 498 - RNA, 19 nt, Artificial Sequence
  Description of Artificial Sequence:  siNA antisense region
ucugucugggcuagggggc

SEQ ID NO: 499 - RNA, 19 nt, Artificial Sequence
  Description of Artificial Sequence:  siNA antisense region
ccccagggugcagagaugu

SEQ ID NO: 500 - RNA, 19 nt, Artificial Sequence
  Description of Artificial Sequence:  siNA antisense region
ugccaguucuguuccaggc

SEQ ID NO: 501 - RNA, 19 nt, Artificial Sequence
  Description of Artificial Sequence:  siNA antisense region
agugaccucuugccucuuu

SEQ ID NO: 502 - RNA, 19 nt, Artificial Sequence
  Description of Artificial Sequence:  siNA antisense region
ugggugacagaggcccuca

SEQ ID NO: 503 - RNA, 19 nt, Artificial Sequence
  Description of Artificial Sequence:  siNA antisense region
caggcaggaggcagguccu

SEQ ID NO: 504 - RNA, 19 nt, Artificial Sequence
  Description of Artificial Sequence:  siNA antisense region
agucuggcgggagaggggc

SEQ ID NO: 505 - RNA, 19 nt, Artificial Sequence
  Description of Artificial Sequence:  siNA antisense region
caguguccauuuucuaaca

SEQ ID NO: 506 - RNA, 19 nt, Artificial Sequence
  Description of Artificial Sequence:  siNA antisense region
caagguccgggcugggcac

SEQ ID NO: 507 - RNA, 19 nt, Artificial Sequence
  Description of Artificial Sequence:  siNA antisense region
caccccggccugggcugcc

SEQ ID NO: 508 - RNA, 19 nt, Artificial Sequence
  Description of Artificial Sequence:  siNA antisense region
guggccaggcccaugcucc

SEQ ID NO: 509 - RNA, 19 nt, Artificial Sequence
  Description of Artificial Sequence:  siNA antisense region
ccucagcaaaggagagagg

SEQ ID NO: 510 - RNA, 19 nt, Artificial Sequence
  Description of Artificial Sequence:  siNA antisense region
ccugccugaagcuggaggc

SEQ ID NO: 511 - RNA, 19 nt, Artificial Sequence
  Description of Artificial Sequence:  siNA antisense region
gggaggagaaggccuuggc

SEQ ID NO: 512 - RNA, 19 nt, Artificial Sequence
  Description of Artificial Sequence:  siNA antisense region
ccguggggagggcgggugg

SEQ ID NO: 513 - RNA, 19 nt, Artificial Sequence
  Description of Artificial Sequence:  siNA antisense region
accugaggucccgaggccc

SEQ ID NO: 514 - RNA, 19 nt, Artificial Sequence
  Description of Artificial Sequence:  siNA antisense region
ggagauugaacuggggcca

SEQ ID NO: 515 - RNA, 19 nt, Artificial Sequence
  Description of Artificial Sequence:  siNA antisense region
ggcgcagcagcagcagcgg

SEQ ID NO: 516 - RNA, 19 nt, Artificial Sequence
  Description of Artificial Sequence:  siNA antisense region
gacgcuggggaagguaagg

SEQ ID NO: 517 - RNA, 19 nt, Artificial Sequence
  Description of Artificial Sequence:  siNA antisense region
agaacugccagagacuggg

SEQ ID NO: 518 - RNA, 19 nt, Artificial Sequence
  Description of Artificial Sequence:  siNA antisense region
ccagaacccuuccauucca

SEQ ID NO: 519 - RNA, 19 nt, Artificial Sequence
  Description of Artificial Sequence:  siNA antisense region
uucagcagguuggggcagc

SEQ ID NO: 520 - RNA, 19 nt, Artificial Sequence
  Description of Artificial Sequence:  siNA antisense region
cacccuccaccucugcccu

SEQ ID NO: 521 - RNA, 19 nt, Artificial Sequence
  Description of Artificial Sequence:  siNA antisense region
ucccuacucagcgcccccc

SEQ ID NO: 522 - RNA, 19 nt, Artificial Sequence
  Description of Artificial Sequence:  siNA antisense region
ggcaggcauggcccugagu

SEQ ID NO: 523 - RNA, 19 nt, Artificial Sequence
  Description of Artificial Sequence:  siNA antisense region
uuugaaugagaugaggggg

SEQ ID NO: 524 - RNA, 19 nt, Artificial Sequence
  Description of Artificial Sequence:  siNA antisense region
agggaaacuaggguggggu

SEQ ID NO: 525 - RNA, 19 nt, Artificial Sequence
  Description of Artificial Sequence:  siNA antisense region
acuaaggaauguuccuuca

SEQ ID NO: 526 - RNA, 19 nt, Artificial Sequence
  Description of Artificial Sequence:  siNA antisense region
gggaugcuagcccuugaga

SEQ ID NO: 527 - RNA, 19 nt, Artificial Sequence
  Description of Artificial Sequence:  siNA antisense region
gcccggccuggcuccucag

SEQ ID NO: 528 - RNA, 19 nt, Artificial Sequence
  Description of Artificial Sequence:  siNA antisense region
ugacagggaggggauucgg

SEQ ID NO: 529 - RNA, 19 nt, Artificial Sequence
  Description of Artificial Sequence:  siNA antisense region
cacgcgaagugacagcuuu

SEQ ID NO: 530 - RNA, 19 nt, Artificial Sequence
  Description of Artificial Sequence:  siNA antisense region
acacagaagcagcgagggc

SEQ ID NO: 531 - RNA, 19 nt, Artificial Sequence
  Description of Artificial Sequence:  siNA antisense region
uccacuucugcucaccaca

SEQ ID NO: 532 - RNA, 19 nt, Artificial Sequence
  Description of Artificial Sequence:  siNA antisense region
cucuccacgccccccagcu

SEQ ID NO: 533 - RNA, 19 nt, Artificial Sequence
  Description of Artificial Sequence:  siNA antisense region
gguggcaggggcgccgggc

SEQ ID NO: 534 - RNA, 19 nt, Artificial Sequence
  Description of Artificial Sequence:  siNA antisense region
uauuagacgggucagggag

SEQ ID NO: 535 - RNA, 19 nt, Artificial Sequence
  Description of Artificial Sequence:  siNA antisense region
cacaucucuauauuuauau

SEQ ID NO: 536 - RNA, 19 nt, Artificial Sequence
  Description of Artificial Sequence:  siNA antisense region
gccauagacacaucucuau

SEQ ID NO: 537 - RNA, 19 nt, Artificial Sequence
  Description of Artificial Sequence:  siNA sense region
uaauugcuugccaucauga

SEQ ID NO: 538 - RNA, 19 nt, Artificial Sequence
  Description of Artificial Sequence:  siNA sense region
agcagaagcaagcgugaca

SEQ ID NO: 539 - RNA, 19 nt, Artificial Sequence
  Description of Artificial Sequence:  siNA sense region
aacaauuuuuauaguguag

SEQ ID NO: 540 - RNA, 19 nt, Artificial Sequence
  Description of Artificial Sequence:  siNA sense region
gagauuggagauucuacau

SEQ ID NO: 541 - RNA, 19 nt, Artificial Sequence
  Description of Artificial Sequence:  siNA sense region
uucacaguccugaaacgau

SEQ ID NO: 542 - RNA, 19 nt, Artificial Sequence
  Description of Artificial Sequence:  siNA sense region
uaucagaauuuaaaaccua

SEQ ID NO: 543 - RNA, 19 nt, Artificial Sequence
  Description of Artificial Sequence:  siNA sense region
auaggcucaggagcucaag

SEQ ID NO: 544 - RNA, 19 nt, Artificial Sequence
  Description of Artificial Sequence:  siNA sense region
ggaauaguaugcgcagcuu

SEQ ID NO: 545 - RNA, 19 nt, Artificial Sequence
  Description of Artificial Sequence:  siNA sense region
uaugaugccauucuugaaa

SEQ ID NO: 546 - RNA, 19 nt, Artificial Sequence
  Description of Artificial Sequence:  siNA sense region
agaaauguugcaaucaaga

SEQ ID NO: 547 - RNA, 19 nt, Artificial Sequence
  Description of Artificial Sequence:  siNA sense region
aagcuaagccgaccauuuc

SEQ ID NO: 548 - RNA, 19 nt, Artificial Sequence
  Description of Artificial Sequence:  siNA sense region
cagaaucagacucaugcca

SEQ ID NO: 549 - RNA, 19 nt, Artificial Sequence
  Description of Artificial Sequence:  siNA sense region
aagcgggccuacagagagc

SEQ ID NO: 550 - RNA, 19 nt, Artificial Sequence
  Description of Artificial Sequence:  siNA sense region
cuaguucuuaugaaaugug

SEQ ID NO: 551 - RNA, 19 nt, Artificial Sequence
  Description of Artificial Sequence:  siNA sense region
guuaaucacaaaaauauaa

SEQ ID NO: 552 - RNA, 19 nt, Artificial Sequence
  Description of Artificial Sequence:  siNA sense region
auuggccuuuugaauguuu

SEQ ID NO: 553 - RNA, 19 nt, Artificial Sequence
  Description of Artificial Sequence:  siNA sense region
uucacaccacagaaauccc

SEQ ID NO: 554 - RNA, 19 nt, Artificial Sequence
  Description of Artificial Sequence:  siNA sense region
cuagaagaauuucaagaug

SEQ ID NO: 555 - RNA, 19 nt, Artificial Sequence
  Description of Artificial Sequence:  siNA sense region
guuuacauagucauggagc

SEQ ID NO: 556 - RNA, 19 nt, Artificial Sequence
  Description of Artificial Sequence:  siNA sense region
cucauggaugcaaaucuuu

SEQ ID NO: 557 - RNA, 19 nt, Artificial Sequence
  Description of Artificial Sequence:  siNA sense region
ugccaagugauucagaugg

SEQ ID NO: 558 - RNA, 19 nt, Artificial Sequence
  Description of Artificial Sequence:  siNA sense region
gagcuagaucaugaaagaa

SEQ ID NO: 559 - RNA, 19 nt, Artificial Sequence
  Description of Artificial Sequence:  siNA sense region
auguccuaccuucucuauc

SEQ ID NO: 560 - RNA, 19 nt, Artificial Sequence
  Description of Artificial Sequence:  siNA sense region
cagaugcuguguggaauca

SEQ ID NO: 561 - RNA, 19 nt, Artificial Sequence
  Description of Artificial Sequence:  siNA sense region
aagcaccuucauucugcug

SEQ ID NO: 562 - RNA, 19 nt, Artificial Sequence
  Description of Artificial Sequence:  siNA sense region
ggaauuauucaucgggacu

SEQ ID NO: 563 - RNA, 19 nt, Artificial Sequence
  Description of Artificial Sequence:  siNA sense region
uuaaagcccaguaauauag

SEQ ID NO: 564 - RNA, 19 nt, Artificial Sequence
  Description of Artificial Sequence:  siNA sense region
guaguaaaaucugauugca

SEQ ID NO: 565 - RNA, 19 nt, Artificial Sequence
  Description of Artificial Sequence:  siNA sense region
acuuugaagauucuugacu

SEQ ID NO: 566 - RNA, 19 nt, Artificial Sequence
  Description of Artificial Sequence:  siNA sense region
uucggucuggccaggacug

SEQ ID NO: 567 - RNA, 19 nt, Artificial Sequence
  Description of Artificial Sequence:  siNA sense region
gcaggaacgaguuuuauga

SEQ ID NO: 568 - RNA, 19 nt, Artificial Sequence
  Description of Artificial Sequence:  siNA sense region
augacgccuuauguaguga

SEQ ID NO: 569 - RNA, 19 nt, Artificial Sequence
  Description of Artificial Sequence:  siNA sense region
acucgcuacuacagagcac

SEQ ID NO: 570 - RNA, 19 nt, Artificial Sequence
  Description of Artificial Sequence:  siNA sense region
cccgaggucauccuuggca

SEQ ID NO: 571 - RNA, 19 nt, Artificial Sequence
  Description of Artificial Sequence:  siNA sense region
augggcuacaaggaaaacg

SEQ ID NO: 572 - RNA, 19 nt, Artificial Sequence
  Description of Artificial Sequence:  siNA sense region
guggauuuauggucugugg

SEQ ID NO: 573 - RNA, 19 nt, Artificial Sequence
  Description of Artificial Sequence:  siNA sense region
gggugcauuaugggagaaa

SEQ ID NO: 574 - RNA, 19 nt, Artificial Sequence
  Description of Artificial Sequence:  siNA sense region
augguuugccacaaaaucc

SEQ ID NO: 575 - RNA, 19 nt, Artificial Sequence
  Description of Artificial Sequence:  siNA sense region
cucuuuccaggaagggacu

SEQ ID NO: 576 - RNA, 19 nt, Artificial Sequence
  Description of Artificial Sequence:  siNA sense region
uauauugaucaguggaaua

SEQ ID NO: 577 - RNA, 19 nt, Artificial Sequence
  Description of Artificial Sequence:  siNA sense region
aaaguuauugaacagcuug

SEQ ID NO: 578 - RNA, 19 nt, Artificial Sequence
  Description of Artificial Sequence:  siNA sense region
ggaacaccauguccugaau

SEQ ID NO: 579 - RNA, 19 nt, Artificial Sequence
  Description of Artificial Sequence:  siNA sense region
uucaugaagaaacugcaac

SEQ ID NO: 580 - RNA, 19 nt, Artificial Sequence
  Description of Artificial Sequence:  siNA sense region
ccaacaguaaggacuuacg

SEQ ID NO: 581 - RNA, 19 nt, Artificial Sequence
  Description of Artificial Sequence:  siNA sense region
guugaaaacagaccuaaau

SEQ ID NO: 582 - RNA, 19 nt, Artificial Sequence
  Description of Artificial Sequence:  siNA sense region
uaugcuggauauagcuuug

SEQ ID NO: 583 - RNA, 19 nt, Artificial Sequence
  Description of Artificial Sequence:  siNA sense region
gagaaacucuucccugaug

SEQ ID NO: 584 - RNA, 19 nt, Artificial Sequence
  Description of Artificial Sequence:  siNA sense region
guccuuuucccagcugacu

SEQ ID NO: 585 - RNA, 19 nt, Artificial Sequence
  Description of Artificial Sequence:  siNA sense region
ucagaacacaacaaacuua

SEQ ID NO: 586 - RNA, 19 nt, Artificial Sequence
  Description of Artificial Sequence:  siNA sense region
aaagccagucaggcaaggg

SEQ ID NO: 587 - RNA, 19 nt, Artificial Sequence
  Description of Artificial Sequence:  siNA sense region
gauuuguuauccaaaaugc

SEQ ID NO: 588 - RNA, 19 nt, Artificial Sequence
  Description of Artificial Sequence:  siNA sense region
cugguaauagaugcaucua

SEQ ID NO: 589 - RNA, 19 nt, Artificial Sequence
  Description of Artificial Sequence:  siNA sense region
aaaaggaucucuguagaug

SEQ ID NO: 590 - RNA, 19 nt, Artificial Sequence
  Description of Artificial Sequence:  siNA sense region
gaagcucuccaacacccgu

SEQ ID NO: 591 - RNA, 19 nt, Artificial Sequence
  Description of Artificial Sequence:  siNA sense region
uacaucaaugucugguaug

SEQ ID NO: 592 - RNA, 19 nt, Artificial Sequence
  Description of Artificial Sequence:  siNA sense region
gauccuucugaagcagaag

SEQ ID NO: 593 - RNA, 19 nt, Artificial Sequence
  Description of Artificial Sequence:  siNA sense region
gcuccaccaccaaagaucc

SEQ ID NO: 594 - RNA, 19 nt, Artificial Sequence
  Description of Artificial Sequence:  siNA sense region
ccugacaagcaguuagaug

SEQ ID NO: 595 - RNA, 19 nt, Artificial Sequence
  Description of Artificial Sequence:  siNA sense region
gaaagggaacacacaauag

SEQ ID NO: 596 - RNA, 19 nt, Artificial Sequence
  Description of Artificial Sequence:  siNA sense region
gaagaguggaaagaauuga

SEQ ID NO: 597 - RNA, 19 nt, Artificial Sequence
  Description of Artificial Sequence:  siNA sense region
auauauaaggaaguuaugg

SEQ ID NO: 598 - RNA, 19 nt, Artificial Sequence
  Description of Artificial Sequence:  siNA sense region
gacuuggaggagagaacca

SEQ ID NO: 599 - RNA, 19 nt, Artificial Sequence
  Description of Artificial Sequence:  siNA sense region
aagaauggaguuauacggg

SEQ ID NO: 600 - RNA, 19 nt, Artificial Sequence
  Description of Artificial Sequence:  siNA sense region
gggcagcccucuccuuuag

SEQ ID NO: 601 - RNA, 19 nt, Artificial Sequence
  Description of Artificial Sequence:  siNA sense region
gcacaggugcagcagugau

SEQ ID NO: 602 - RNA, 19 nt, Artificial Sequence
  Description of Artificial Sequence:  siNA sense region
ucaauggcucucagcaucc

SEQ ID NO: 603 - RNA, 19 nt, Artificial Sequence
  Description of Artificial Sequence:  siNA sense region
caucaucaucgucgucugu

SEQ ID NO: 604 - RNA, 19 nt, Artificial Sequence
  Description of Artificial Sequence:  siNA sense region
ucaaugaugugucuucaau

SEQ ID NO: 605 - RNA, 19 nt, Artificial Sequence
  Description of Artificial Sequence:  siNA sense region
ugucaacagauccgacuuu

SEQ ID NO: 606 - RNA, 19 nt, Artificial Sequence
  Description of Artificial Sequence:  siNA sense region
uggccucugauacagacag

SEQ ID NO: 607 - RNA, 19 nt, Artificial Sequence
  Description of Artificial Sequence:  siNA sense region
gcagucuagaagcagcagc

SEQ ID NO: 608 - RNA, 19 nt, Artificial Sequence
  Description of Artificial Sequence:  siNA sense region
cugggccucugggcugcug

SEQ ID NO: 609 - RNA, 19 nt, Artificial Sequence
  Description of Artificial Sequence:  siNA sense region
guagaugacuacuugggcc

SEQ ID NO: 610 - RNA, 19 nt, Artificial Sequence
  Description of Artificial Sequence:  siNA sense region
caucggggggugggaggga

SEQ ID NO: 611 - RNA, 19 nt, Artificial Sequence
  Description of Artificial Sequence:  siNA sense region
auggggagucgguuaguca

SEQ ID NO: 612 - RNA, 19 nt, Artificial Sequence
  Description of Artificial Sequence:  siNA sense region
auugauagaacuacuuuga

SEQ ID NO: 613 - RNA, 19 nt, Artificial Sequence
  Description of Artificial Sequence:  siNA sense region
aaaacaauucaguggucuu

SEQ ID NO: 614 - RNA, 19 nt, Artificial Sequence
  Description of Artificial Sequence:  siNA sense region
uauuuuugggugauuuuuc

SEQ ID NO: 615 - RNA, 19 nt, Artificial Sequence
  Description of Artificial Sequence:  siNA sense region
ggugauuuuucaaaaaaug

SEQ ID NO: 616 - RNA, 19 nt, Artificial Sequence
  Description of Artificial Sequence:  siNA antisense region
ucaugauggcaagcaauua

SEQ ID NO: 617 - RNA, 19 nt, Artificial Sequence
  Description of Artificial Sequence:  siNA antisense region
ugucacgcuugcuucugcu

SEQ ID NO: 618 - RNA, 19 nt, Artificial Sequence
  Description of Artificial Sequence:  siNA antisense region
cuacacuauaaaaauuguu

SEQ ID NO: 619 - RNA, 19 nt, Artificial Sequence
  Description of Artificial Sequence:  siNA antisense region
auguagaaucuccaaucuc

SEQ ID NO: 620 - RNA, 19 nt, Artificial Sequence
  Description of Artificial Sequence:  siNA antisense region
aucguuucaggacugugaa

SEQ ID NO: 621 - RNA, 19 nt, Artificial Sequence
  Description of Artificial Sequence:  siNA antisense region
uagguuuuaaauucugaua

SEQ ID NO: 622 - RNA, 19 nt, Artificial Sequence
  Description of Artificial Sequence:  siNA antisense region
cuugagcuccugagccuau

SEQ ID NO: 623 - RNA, 19 nt, Artificial Sequence
  Description of Artificial Sequence:  siNA antisense region
aagcugcgcauacuauucc

SEQ ID NO: 624 - RNA, 19 nt, Artificial Sequence
  Description of Artificial Sequence:  siNA antisense region
uuucaagaauggcaucaua

SEQ ID NO: 625 - RNA, 19 nt, Artificial Sequence
  Description of Artificial Sequence:  siNA antisense region
ucuugauugcaacauuucu

SEQ ID NO: 626 - RNA, 19 nt, Artificial Sequence
  Description of Artificial Sequence:  siNA antisense region
gaaauggucggcuuagcuu

SEQ ID NO: 627 - RNA, 19 nt, Artificial Sequence
  Description of Artificial Sequence:  siNA antisense region
uggcaugagucugauucug

SEQ ID NO: 628 - RNA, 19 nt, Artificial Sequence
  Description of Artificial Sequence:  siNA antisense region
gcucucuguaggcccgcuu

SEQ ID NO: 629 - RNA, 19 nt, Artificial Sequence
  Description of Artificial Sequence:  siNA antisense region
cacauuucauaagaacuag

SEQ ID NO: 630 - RNA, 19 nt, Artificial Sequence
  Description of Artificial Sequence:  siNA antisense region
uuauauuuuugugauuaac

SEQ ID NO: 631 - RNA, 19 nt, Artificial Sequence
  Description of Artificial Sequence:  siNA antisense region
aaacauucaaaaggccaau

SEQ ID NO: 632 - RNA, 19 nt, Artificial Sequence
  Description of Artificial Sequence:  siNA antisense region
gggauuucuguggugugaa

SEQ ID NO: 633 - RNA, 19 nt, Artificial Sequence
  Description of Artificial Sequence:  siNA antisense region
caucuugaaauucuucuag

SEQ ID NO: 634 - RNA, 19 nt, Artificial Sequence
  Description of Artificial Sequence:  siNA antisense region
gcuccaugacuauguaaac

SEQ ID NO: 635 - RNA, 19 nt, Artificial Sequence
  Description of Artificial Sequence:  siNA antisense region
aaagauuugcauccaugag

SEQ ID NO: 636 - RNA, 19 nt, Artificial Sequence
  Description of Artificial Sequence:  siNA antisense region
ccaucugaaucacuuggca

SEQ ID NO: 637 - RNA, 19 nt, Artificial Sequence
  Description of Artificial Sequence:  siNA antisense region
uucuuucaugaucuagcuc

SEQ ID NO: 638 - RNA, 19 nt, Artificial Sequence
  Description of Artificial Sequence:  siNA antisense region
gauagagaagguaggacau

SEQ ID NO: 639 - RNA, 19 nt, Artificial Sequence
  Description of Artificial Sequence:  siNA antisense region
ugauuccacacagcaucug

SEQ ID NO: 640 - RNA, 19 nt, Artificial Sequence
  Description of Artificial Sequence:  siNA antisense region
cagcagaaugaaggugcuu

SEQ ID NO: 641 - RNA, 19 nt, Artificial Sequence
  Description of Artificial Sequence:  siNA antisense region
agucccgaugaauaauucc

SEQ ID NO: 642 - RNA, 19 nt, Artificial Sequence
  Description of Artificial Sequence:  siNA antisense region
cuauauuacugggcuuuaa

SEQ ID NO: 643 - RNA, 19 nt, Artificial Sequence
  Description of Artificial Sequence:  siNA antisense region
ugcaaucagauuuuacuac

SEQ ID NO: 644 - RNA, 19 nt, Artificial Sequence
  Description of Artificial Sequence:  siNA antisense region
agucaagaaucuucaaagu

SEQ ID NO: 645 - RNA, 19 nt, Artificial Sequence
  Description of Artificial Sequence:  siNA antisense region
caguccuggccagaccgaa

SEQ ID NO: 646 - RNA, 19 nt, Artificial Sequence
  Description of Artificial Sequence:  siNA antisense region
ucauaaaacucguuccugc

SEQ ID NO: 647 - RNA, 19 nt, Artificial Sequence
  Description of Artificial Sequence:  siNA antisense region
ucacuacauaaggcgucau

SEQ ID NO: 648 - RNA, 19 nt, Artificial Sequence
  Description of Artificial Sequence:  siNA antisense region
gugcucuguaguagcgagu

SEQ ID NO: 649 - RNA, 19 nt, Artificial Sequence
  Description of Artificial Sequence:  siNA antisense region
ugccaaggaugaccucggg

SEQ ID NO: 650 - RNA, 19 nt, Artificial Sequence
  Description of Artificial Sequence:  siNA antisense region
cguuuuccuuguagcccau

SEQ ID NO: 651 - RNA, 19 nt, Artificial Sequence
  Description of Artificial Sequence:  siNA antisense region
ccacagaccauaaauccac

SEQ ID NO: 652 - RNA, 19 nt, Artificial Sequence
  Description of Artificial Sequence:  siNA antisense region
uuucucccauaaugcaccc

SEQ ID NO: 653 - RNA, 19 nt, Artificial Sequence
  Description of Artificial Sequence:  siNA antisense region
ggauuuuguggcaaaccau

SEQ ID NO: 654 - RNA, 19 nt, Artificial Sequence
  Description of Artificial Sequence:  siNA antisense region
agucccuuccuggaaagag

SEQ ID NO: 655 - RNA, 19 nt, Artificial Sequence
  Description of Artificial Sequence:  siNA antisense region
uauuccacugaucaauaua

SEQ ID NO: 656 - RNA, 19 nt, Artificial Sequence
  Description of Artificial Sequence:  siNA antisense region
caagcuguucaauaacuuu

SEQ ID NO: 657 - RNA, 19 nt, Artificial Sequence
  Description of Artificial Sequence:  siNA antisense region
auucaggacaugguguucc

SEQ ID NO: 658 - RNA, 19 nt, Artificial Sequence
  Description of Artificial Sequence:  siNA antisense region
guugcaguuucuucaugaa

SEQ ID NO: 659 - RNA, 19 nt, Artificial Sequence
  Description of Artificial Sequence:  siNA antisense region
cguaaguccuuacuguugg

SEQ ID NO: 660 - RNA, 19 nt, Artificial Sequence
  Description of Artificial Sequence:  siNA antisense region
auuuaggucuguuuucaac

SEQ ID NO: 661 - RNA, 19 nt, Artificial Sequence
  Description of Artificial Sequence:  siNA antisense region
caaagcuauauccagcaua

SEQ ID NO: 662 - RNA, 19 nt, Artificial Sequence
  Description of Artificial Sequence:  siNA antisense region
caucagggaagaguuucuc

SEQ ID NO: 663 - RNA, 19 nt, Artificial Sequence
  Description of Artificial Sequence:  siNA antisense region
agucagcugggaaaaggac

SEQ ID NO: 664 - RNA, 19 nt, Artificial Sequence
  Description of Artificial Sequence:  siNA antisense region
uaaguuuguuguguucuga

SEQ ID NO: 665 - RNA, 19 nt, Artificial Sequence
  Description of Artificial Sequence:  siNA antisense region
cccuugccugacuggcuuu

SEQ ID NO: 666 - RNA, 19 nt, Artificial Sequence
  Description of Artificial Sequence:  siNA antisense region
gcauuuuggauaacaaauc

SEQ ID NO: 667 - RNA, 19 nt, Artificial Sequence
  Description of Artificial Sequence:  siNA antisense region
uagaugcaucuauuaccag

SEQ ID NO: 668 - RNA, 19 nt, Artificial Sequence
  Description of Artificial Sequence:  siNA antisense region
caucuacagagauccuuuu

SEQ ID NO: 669 - RNA, 19 nt, Artificial Sequence
  Description of Artificial Sequence:  siNA antisense region
acggguguuggagagcuuc

SEQ ID NO: 670 - RNA, 19 nt, Artificial Sequence
  Description of Artificial Sequence:  siNA antisense region
cauaccagacauugaugua

SEQ ID NO: 671 - RNA, 19 nt, Artificial Sequence
  Description of Artificial Sequence:  siNA antisense region
cuucugcuucagaaggauc

SEQ ID NO: 672 - RNA, 19 nt, Artificial Sequence
  Description of Artificial Sequence:  siNA antisense region
ggaucuuuggugguggagc

SEQ ID NO: 673 - RNA, 19 nt, Artificial Sequence
  Description of Artificial Sequence:  siNA antisense region
caucuaacugcuugucagg

SEQ ID NO: 674 - RNA, 19 nt, Artificial Sequence
  Description of Artificial Sequence:  siNA antisense region
cuauuguguguucccuuuc

SEQ ID NO: 675 - RNA, 19 nt, Artificial Sequence
  Description of Artificial Sequence:  siNA antisense region
ucaauucuuuccacucuuc

SEQ ID NO: 676 - RNA, 19 nt, Artificial Sequence
  Description of Artificial Sequence:  siNA antisense region
ccauaacuuccuuauauau

SEQ ID NO: 677 - RNA, 19 nt, Artificial Sequence
  Description of Artificial Sequence:  siNA antisense region
ugguucucuccuccaaguc

SEQ ID NO: 678 - RNA, 19 nt, Artificial Sequence
  Description of Artificial Sequence:  siNA antisense region
cccguauaacuccauucuu

SEQ ID NO: 679 - RNA, 19 nt, Artificial Sequence
  Description of Artificial Sequence:  siNA antisense region
cuaaaggagagggcugccc

SEQ ID NO: 680 - RNA, 19 nt, Artificial Sequence
  Description of Artificial Sequence:  siNA antisense region
aucacugcugcaccugugc

SEQ ID NO: 681 - RNA, 19 nt, Artificial Sequence
  Description of Artificial Sequence:  siNA antisense region
ggaugcugagagccauuga

SEQ ID NO: 682 - RNA, 19 nt, Artificial Sequence
  Description of Artificial Sequence:  siNA antisense region
acagacgacgaugaugaug

SEQ ID NO: 683 - RNA, 19 nt, Artificial Sequence
  Description of Artificial Sequence:  siNA antisense region
auugaagacacaucauuga

SEQ ID NO: 684 - RNA, 19 nt, Artificial Sequence
  Description of Artificial Sequence:  siNA antisense region
aaagucggaucuguugaca

SEQ ID NO: 685 - RNA, 19 nt, Artificial Sequence
  Description of Artificial Sequence:  siNA antisense region
cugucuguaucagaggcca

SEQ ID NO: 686 - RNA, 19 nt, Artificial Sequence
  Description of Artificial Sequence:  siNA antisense region
gcugcugcuucuagacugc

SEQ ID NO: 687 - RNA, 19 nt, Artificial Sequence
  Description of Artificial Sequence:  siNA antisense region
cagcagcccagaggcccag

SEQ ID NO: 688 - RNA, 19 nt, Artificial Sequence
  Description of Artificial Sequence:  siNA antisense region
ggcccaaguagucaucuac

SEQ ID NO: 689 - RNA, 19 nt, Artificial Sequence
  Description of Artificial Sequence:  siNA antisense region
ucccucccaccccccgaug

SEQ ID NO: 690 - RNA, 19 nt, Artificial Sequence
  Description of Artificial Sequence:  siNA antisense region
ugacuaaccgacuccccau

SEQ ID NO: 691 - RNA, 19 nt, Artificial Sequence
  Description of Artificial Sequence:  siNA antisense region
ucaaaguaguucuaucaau

SEQ ID NO: 692 - RNA, 19 nt, Artificial Sequence
  Description of Artificial Sequence:  siNA antisense region
aagaccacugaauuguuuu

SEQ ID NO: 693 - RNA, 19 nt, Artificial Sequence
  Description of Artificial Sequence:  siNA antisense region
gaaaaaucacccaaaaaua

SEQ ID NO: 694 - RNA, 19 nt, Artificial Sequence
  Description of Artificial Sequence:  siNA antisense region
cauuuuuugaaaaaucacc

SEQ ID NO: 695 - RNA, 19 nt, Artificial Sequence
  Description of Artificial Sequence:  siNA sense region
aaccgcgaccacuggagcc

SEQ ID NO: 696 - RNA, 19 nt, Artificial Sequence
  Description of Artificial Sequence:  siNA sense region
cuuagcgggcgcagcagcu

SEQ ID NO: 697 - RNA, 19 nt, Artificial Sequence
  Description of Artificial Sequence:  siNA sense region
uggaacgggaguacugcga

SEQ ID NO: 698 - RNA, 19 nt, Artificial Sequence
  Description of Artificial Sequence:  siNA sense region
acgcagcccggagucggcc

SEQ ID NO: 699 - RNA, 19 nt, Artificial Sequence
  Description of Artificial Sequence:  siNA sense region
cuuguaggggcgaaggugc

SEQ ID NO: 700 - RNA, 19 nt, Artificial Sequence
  Description of Artificial Sequence:  siNA sense region
cagggagaucgcggcgggc

SEQ ID NO: 701 - RNA, 19 nt, Artificial Sequence
  Description of Artificial Sequence:  siNA sense region
cgcagucuugagcgccgga

SEQ ID NO: 702 - RNA, 19 nt, Artificial Sequence
  Description of Artificial Sequence:  siNA sense region
agcgcgucccugcccuuag

SEQ ID NO: 703 - RNA, 19 nt, Artificial Sequence
  Description of Artificial Sequence:  siNA sense region
gcggggcuugccccagucg

SEQ ID NO: 704 - RNA, 19 nt, Artificial Sequence
  Description of Artificial Sequence:  siNA sense region
gcaggggcacauccagccg

SEQ ID NO: 705 - RNA, 19 nt, Artificial Sequence
  Description of Artificial Sequence:  siNA sense region
gcugcggcugacagcagcc

SEQ ID NO: 706 - RNA, 19 nt, Artificial Sequence
  Description of Artificial Sequence:  siNA sense region
cgcgcgcgcgggagucugc

SEQ ID NO: 707 - RNA, 19 nt, Artificial Sequence
  Description of Artificial Sequence:  siNA sense region
cggggucgcggcagccgca

SEQ ID NO: 708 - RNA, 19 nt, Artificial Sequence
  Description of Artificial Sequence:  siNA sense region
accugcgcgggcgaccagc

SEQ ID NO: 709 - RNA, 19 nt, Artificial Sequence
  Description of Artificial Sequence:  siNA sense region
cgcaagguccccgcccggc

SEQ ID NO: 710 - RNA, 19 nt, Artificial Sequence
  Description of Artificial Sequence:  siNA sense region
cugggcgggcagcaagggc

SEQ ID NO: 711 - RNA, 19 nt, Artificial Sequence
  Description of Artificial Sequence:  siNA sense region
ccggggagagggugcgggu

SEQ ID NO: 712 - RNA, 19 nt, Artificial Sequence
  Description of Artificial Sequence:  siNA sense region
ugcaggcgggggccccaca

SEQ ID NO: 713 - RNA, 19 nt, Artificial Sequence
  Description of Artificial Sequence:  siNA sense region
agggccaccuucuugcccg

SEQ ID NO: 714 - RNA, 19 nt, Artificial Sequence
  Description of Artificial Sequence:  siNA sense region
ggcggcugccgcuggaaaa

SEQ ID NO: 715 - RNA, 19 nt, Artificial Sequence
  Description of Artificial Sequence:  siNA sense region
augucucaggagaggccca

SEQ ID NO: 716 - RNA, 19 nt, Artificial Sequence
  Description of Artificial Sequence:  siNA sense region
acguucuaccggcaggagc

SEQ ID NO: 717 - RNA, 19 nt, Artificial Sequence
  Description of Artificial Sequence:  siNA sense region
cugaacaagacaaucuggg

SEQ ID NO: 718 - RNA, 19 nt, Artificial Sequence
  Description of Artificial Sequence:  siNA sense region
gaggugcccgagcguuacc

SEQ ID NO: 719 - RNA, 19 nt, Artificial Sequence
  Description of Artificial Sequence:  siNA sense region
cagaaccugucuccagugg

SEQ ID NO: 720 - RNA, 19 nt, Artificial Sequence
  Description of Artificial Sequence:  siNA sense region
ggcucuggcgccuauggcu

SEQ ID NO: 721 - RNA, 19 nt, Artificial Sequence
  Description of Artificial Sequence:  siNA sense region
ucugugugugcugcuuuug

SEQ ID NO: 722 - RNA, 19 nt, Artificial Sequence
  Description of Artificial Sequence:  siNA sense region
gacacaaaaacgggguuac

SEQ ID NO: 723 - RNA, 19 nt, Artificial Sequence
  Description of Artificial Sequence:  siNA sense region
cguguggcagugaagaagc

SEQ ID NO: 724 - RNA, 19 nt, Artificial Sequence
  Description of Artificial Sequence:  siNA sense region
cucuccagaccauuucagu

SEQ ID NO: 725 - RNA, 19 nt, Artificial Sequence
  Description of Artificial Sequence:  siNA sense region
uccaucauucaugcgaaaa

SEQ ID NO: 726 - RNA, 19 nt, Artificial Sequence
  Description of Artificial Sequence:  siNA sense region
agaaccuacagagaacugc

SEQ ID NO: 727 - RNA, 19 nt, Artificial Sequence
  Description of Artificial Sequence:  siNA sense region
cgguuacuuaaacauauga

SEQ ID NO: 728 - RNA, 19 nt, Artificial Sequence
  Description of Artificial Sequence:  siNA sense region
aaacaugaaaaugugauug

SEQ ID NO: 729 - RNA, 19 nt, Artificial Sequence
  Description of Artificial Sequence:  siNA sense region
ggucuguuggacguuuuua

SEQ ID NO: 730 - RNA, 19 nt, Artificial Sequence
  Description of Artificial Sequence:  siNA sense region
acaccugcaaggucucugg

SEQ ID NO: 731 - RNA, 19 nt, Artificial Sequence
  Description of Artificial Sequence:  siNA sense region
gaggaauucaaugaugugu

SEQ ID NO: 732 - RNA, 19 nt, Artificial Sequence
  Description of Artificial Sequence:  siNA sense region
uaucuggugacccaucuca

SEQ ID NO: 733 - RNA, 19 nt, Artificial Sequence
  Description of Artificial Sequence:  siNA sense region
augggggcagaucugaaca

SEQ ID NO: 734 - RNA, 19 nt, Artificial Sequence
  Description of Artificial Sequence:  siNA sense region
aacauugugaaaugucaga

SEQ ID NO: 735 - RNA, 19 nt, Artificial Sequence
  Description of Artificial Sequence:  siNA sense region
aagcuuacagaugaccaug

SEQ ID NO: 736 - RNA, 19 nt, Artificial Sequence
  Description of Artificial Sequence:  siNA sense region
guucaguuccuuaucuacc

SEQ ID NO: 737 - RNA, 19 nt, Artificial Sequence
  Description of Artificial Sequence:  siNA sense region
caaauucuccgaggucuaa

SEQ ID NO: 738 - RNA, 19 nt, Artificial Sequence
  Description of Artificial Sequence:  siNA sense region
aaguauauacauucagcug

SEQ ID NO: 739 - RNA, 19 nt, Artificial Sequence
  Description of Artificial Sequence:  siNA sense region
gacauaauucacagggacc

SEQ ID NO: 740 - RNA, 19 nt, Artificial Sequence
  Description of Artificial Sequence:  siNA sense region
cuaaaaccuaguaaucuag

SEQ ID NO: 741 - RNA, 19 nt, Artificial Sequence
  Description of Artificial Sequence:  siNA sense region
gcugugaaugaagacugug

SEQ ID NO: 742 - RNA, 19 nt, Artificial Sequence
  Description of Artificial Sequence:  siNA sense region
gagcugaagauucuggauu

SEQ ID NO: 743 - RNA, 19 nt, Artificial Sequence
  Description of Artificial Sequence:  siNA sense region
uuuggacuggcucggcaca

SEQ ID NO: 744 - RNA, 19 nt, Artificial Sequence
  Description of Artificial Sequence:  siNA sense region
acagaugaugaaaugacag

SEQ ID NO: 745 - RNA, 19 nt, Artificial Sequence
  Description of Artificial Sequence:  siNA sense region
ggcuacguggccacuaggu

SEQ ID NO: 746 - RNA, 19 nt, Artificial Sequence
  Description of Artificial Sequence:  siNA sense region
ugguacagggcuccugaga

SEQ ID NO: 747 - RNA, 19 nt, Artificial Sequence
  Description of Artificial Sequence:  siNA sense region
aucaugcugaacuggaugc

SEQ ID NO: 748 - RNA, 19 nt, Artificial Sequence
  Description of Artificial Sequence:  siNA sense region
cauuacaaccagacaguug

SEQ ID NO: 749 - RNA, 19 nt, Artificial Sequence
  Description of Artificial Sequence:  siNA sense region
gauauuuggucagugggau

SEQ ID NO: 750 - RNA, 19 nt, Artificial Sequence
  Description of Artificial Sequence:  siNA sense region
ugcauaauggccgagcugu

SEQ ID NO: 751 - RNA, 19 nt, Artificial Sequence
  Description of Artificial Sequence:  siNA sense region
uugacuggaagaacauugu

SEQ ID NO: 752 - RNA, 19 nt, Artificial Sequence
  Description of Artificial Sequence:  siNA sense region
uuuccugguacagaccaua

SEQ ID NO: 753 - RNA, 19 nt, Artificial Sequence
  Description of Artificial Sequence:  siNA sense region
auugaucaguugaagcuca

SEQ ID NO: 754 - RNA, 19 nt, Artificial Sequence
  Description of Artificial Sequence:  siNA sense region
auuuuaagacucguuggaa

SEQ ID NO: 755 - RNA, 19 nt, Artificial Sequence
  Description of Artificial Sequence:  siNA sense region
accccaggggcugagcuuu

SEQ ID NO: 756 - RNA, 19 nt, Artificial Sequence
  Description of Artificial Sequence:  siNA sense region
uugaagaaaaucuccucag

SEQ ID NO: 757 - RNA, 19 nt, Artificial Sequence
  Description of Artificial Sequence:  siNA sense region
gagucugcaagaaacuaua

SEQ ID NO: 758 - RNA, 19 nt, Artificial Sequence
  Description of Artificial Sequence:  siNA sense region
auucagucuuugacucaga

SEQ ID NO: 759 - RNA, 19 nt, Artificial Sequence
  Description of Artificial Sequence:  siNA sense region
augccgaagaugaacuuug

SEQ ID NO: 760 - RNA, 19 nt, Artificial Sequence
  Description of Artificial Sequence:  siNA sense region
gcgaauguauuuauuggug

SEQ ID NO: 761 - RNA, 19 nt, Artificial Sequence
  Description of Artificial Sequence:  siNA sense region
gccaauccccuggcugucg

SEQ ID NO: 762 - RNA, 19 nt, Artificial Sequence
  Description of Artificial Sequence:  siNA sense region
gacuugcuggagaagaugc

SEQ ID NO: 763 - RNA, 19 nt, Artificial Sequence
  Description of Artificial Sequence:  siNA sense region
cuuguauuggacucagaua

SEQ ID NO: 764 - RNA, 19 nt, Artificial Sequence
  Description of Artificial Sequence:  siNA sense region
aagagaauuacagcggccc

SEQ ID NO: 765 - RNA, 19 nt, Artificial Sequence
  Description of Artificial Sequence:  siNA sense region
caagcccuugcacaugccu

SEQ ID NO: 766 - RNA, 19 nt, Artificial Sequence
  Description of Artificial Sequence:  siNA sense region
uacuuugcucaguaccacg

SEQ ID NO: 767 - RNA, 19 nt, Artificial Sequence
  Description of Artificial Sequence:  siNA sense region
gauccugaugaugaaccag

SEQ ID NO: 768 - RNA, 19 nt, Artificial Sequence
  Description of Artificial Sequence:  siNA sense region
guggccgauccuuaugauc

SEQ ID NO: 769 - RNA, 19 nt, Artificial Sequence
  Description of Artificial Sequence:  siNA sense region
caguccuuugaaagcaggg

SEQ ID NO: 770 - RNA, 19 nt, Artificial Sequence
  Description of Artificial Sequence:  siNA sense region
gaccuccuuauagaugagu

SEQ ID NO: 771 - RNA, 19 nt, Artificial Sequence
  Description of Artificial Sequence:  siNA sense region
uggaaaagccugaccuaug

SEQ ID NO: 772 - RNA, 19 nt, Artificial Sequence
  Description of Artificial Sequence:  siNA sense region
gaugaagucaucagcuuug

SEQ ID NO: 773 - RNA, 19 nt, Artificial Sequence
  Description of Artificial Sequence:  siNA sense region
gugccaccaccccuugacc

SEQ ID NO: 774 - RNA, 19 nt, Artificial Sequence
  Description of Artificial Sequence:  siNA sense region
caagaagagauggaguccu

SEQ ID NO: 775 - RNA, 19 nt, Artificial Sequence
  Description of Artificial Sequence:  siNA sense region
ugagcaccugguuucuguu

SEQ ID NO: 776 - RNA, 19 nt, Artificial Sequence
  Description of Artificial Sequence:  siNA sense region
ucuguugaucccacuucac

SEQ ID NO: 777 - RNA, 19 nt, Artificial Sequence
  Description of Artificial Sequence:  siNA sense region
cugugaggggaaggccuuu

SEQ ID NO: 778 - RNA, 19 nt, Artificial Sequence
  Description of Artificial Sequence:  siNA sense region
uucacgggaacucuccaaa

SEQ ID NO: 779 - RNA, 19 nt, Artificial Sequence
  Description of Artificial Sequence:  siNA sense region
auauuauucaagugccucu

SEQ ID NO: 780 - RNA, 19 nt, Artificial Sequence
  Description of Artificial Sequence:  siNA sense region
uuguugcagagauuuccuc

SEQ ID NO: 781 - RNA, 19 nt, Artificial Sequence
  Description of Artificial Sequence:  siNA sense region
ccaugguggaagggggugu

SEQ ID NO: 782 - RNA, 19 nt, Artificial Sequence
  Description of Artificial Sequence:  siNA sense region
ugcgugcgugugcgugcgu

SEQ ID NO: 783 - RNA, 19 nt, Artificial Sequence
  Description of Artificial Sequence:  siNA sense region
uguuagugugugugcaugu

SEQ ID NO: 784 - RNA, 19 nt, Artificial Sequence
  Description of Artificial Sequence:  siNA sense region
ugugugucugucuuugugg

SEQ ID NO: 785 - RNA, 19 nt, Artificial Sequence
  Description of Artificial Sequence:  siNA sense region
ggaggguaagacaauauga

SEQ ID NO: 786 - RNA, 19 nt, Artificial Sequence
  Description of Artificial Sequence:  siNA sense region
aacaaacuaugaucacagu

SEQ ID NO: 787 - RNA, 19 nt, Artificial Sequence
  Description of Artificial Sequence:  siNA sense region
ugacuuuacaggagguugu

SEQ ID NO: 788 - RNA, 19 nt, Artificial Sequence
  Description of Artificial Sequence:  siNA sense region
uggaugcuccagggcagcc

SEQ ID NO: 789 - RNA, 19 nt, Artificial Sequence
  Description of Artificial Sequence:  siNA sense region
cuccaccuugcucuucuuu

SEQ ID NO: 790 - RNA, 19 nt, Artificial Sequence
  Description of Artificial Sequence:  siNA sense region
ucugagaguuggcucaggc

SEQ ID NO: 791 - RNA, 19 nt, Artificial Sequence
  Description of Artificial Sequence:  siNA sense region
cagacaagagcugcugucc

SEQ ID NO: 792 - RNA, 19 nt, Artificial Sequence
  Description of Artificial Sequence:  siNA sense region
cuuuuaggaauauguucaa

SEQ ID NO: 793 - RNA, 19 nt, Artificial Sequence
  Description of Artificial Sequence:  siNA sense region
augcaaaguaaaaaaauau

SEQ ID NO: 794 - RNA, 19 nt, Artificial Sequence
  Description of Artificial Sequence:  siNA sense region
ugaauuguccccaaucccg

SEQ ID NO: 795 - RNA, 19 nt, Artificial Sequence
  Description of Artificial Sequence:  siNA sense region
ggucaugcuuuugccacuu

SEQ ID NO: 796 - RNA, 19 nt, Artificial Sequence
  Description of Artificial Sequence:  siNA sense region
uuggcuucuccugugaccc

SEQ ID NO: 797 - RNA, 19 nt, Artificial Sequence
  Description of Artificial Sequence:  siNA sense region
ccaccuugacgguggggcg

SEQ ID NO: 798 - RNA, 19 nt, Artificial Sequence
  Description of Artificial Sequence:  siNA sense region
guagacuugacaacauccc

SEQ ID NO: 799 - RNA, 19 nt, Artificial Sequence
  Description of Artificial Sequence:  siNA sense region
cacaguggcacggagagaa

SEQ ID NO: 800 - RNA, 19 nt, Artificial Sequence
  Description of Artificial Sequence:  siNA sense region
aggcccauaccuucugguu

SEQ ID NO: 801 - RNA, 19 nt, Artificial Sequence
  Description of Artificial Sequence:  siNA sense region
ugcuucagaccugacaccg

SEQ ID NO: 802 - RNA, 19 nt, Artificial Sequence
  Description of Artificial Sequence:  siNA sense region
gucccucagugauacguac

SEQ ID NO: 803 - RNA, 19 nt, Artificial Sequence
  Description of Artificial Sequence:  siNA sense region
cagccaaaaaggaccaacu

SEQ ID NO: 804 - RNA, 19 nt, Artificial Sequence
  Description of Artificial Sequence:  siNA sense region
uggcuucugugcacuagcc

SEQ ID NO: 805 - RNA, 19 nt, Artificial Sequence
  Description of Artificial Sequence:  siNA sense region
cugugauuaacuugcuuag

SEQ ID NO: 806 - RNA, 19 nt, Artificial Sequence
  Description of Artificial Sequence:  siNA sense region
guaugguucucagaucuug

SEQ ID NO: 807 - RNA, 19 nt, Artificial Sequence
  Description of Artificial Sequence:  siNA sense region
gacaguauauuugaaacug

SEQ ID NO: 808 - RNA, 19 nt, Artificial Sequence
  Description of Artificial Sequence:  siNA sense region
guaaauauguuugugccuu

SEQ ID NO: 809 - RNA, 19 nt, Artificial Sequence
  Description of Artificial Sequence:  siNA sense region
uaaaaggagagaagaaagu

SEQ ID NO: 810 - RNA, 19 nt, Artificial Sequence
  Description of Artificial Sequence:  siNA sense region
uguagauaguuaaaagacu

SEQ ID NO: 811 - RNA, 19 nt, Artificial Sequence
  Description of Artificial Sequence:  siNA sense region
ugcagcugcugaaguucug

SEQ ID NO: 812 - RNA, 19 nt, Artificial Sequence
  Description of Artificial Sequence:  siNA sense region
gagccgggcaagucgagag

SEQ ID NO: 813 - RNA, 19 nt, Artificial Sequence
  Description of Artificial Sequence:  siNA sense region
gggcuguuggacagcugcu

SEQ ID NO: 814 - RNA, 19 nt, Artificial Sequence
  Description of Artificial Sequence:  siNA sense region
uugugggcccggaguaauc

SEQ ID NO: 815 - RNA, 19 nt, Artificial Sequence
  Description of Artificial Sequence:  siNA sense region
caggcagccuucauaggcg

SEQ ID NO: 816 - RNA, 19 nt, Artificial Sequence
  Description of Artificial Sequence:  siNA sense region
ggucaugugugcaugugag

SEQ ID NO: 817 - RNA, 19 nt, Artificial Sequence
  Description of Artificial Sequence:  siNA sense region
gcacaugcguauaugugcg

SEQ ID NO: 818 - RNA, 19 nt, Artificial Sequence
  Description of Artificial Sequence:  siNA sense region
gucucucuuucucccucac

SEQ ID NO: 819 - RNA, 19 nt, Artificial Sequence
  Description of Artificial Sequence:  siNA sense region
cccccagguguugccauuu

SEQ ID NO: 820 - RNA, 19 nt, Artificial Sequence
  Description of Artificial Sequence:  siNA sense region
ucucugcuuacccuucacc

SEQ ID NO: 821 - RNA, 19 nt, Artificial Sequence
  Description of Artificial Sequence:  siNA sense region
cuuuggugcagagguuucu

SEQ ID NO: 822 - RNA, 19 nt, Artificial Sequence
  Description of Artificial Sequence:  siNA sense region
uugaauaucugccccagua

SEQ ID NO: 823 - RNA, 19 nt, Artificial Sequence
  Description of Artificial Sequence:  siNA sense region
agucagaagcagguucuug

SEQ ID NO: 824 - RNA, 19 nt, Artificial Sequence
  Description of Artificial Sequence:  siNA sense region
gaugucauguacuuccugu

SEQ ID NO: 825 - RNA, 19 nt, Artificial Sequence
  Description of Artificial Sequence:  siNA sense region
uguacucuuuauuucuagc

SEQ ID NO: 826 - RNA, 19 nt, Artificial Sequence
  Description of Artificial Sequence:  siNA sense region
cagagugaggauguguuuu

SEQ ID NO: 827 - RNA, 19 nt, Artificial Sequence
  Description of Artificial Sequence:  siNA sense region
ugcacgucuugcuauuuga

SEQ ID NO: 828 - RNA, 19 nt, Artificial Sequence
  Description of Artificial Sequence:  siNA sense region
agcaugcacagcugcuugu

SEQ ID NO: 829 - RNA, 19 nt, Artificial Sequence
  Description of Artificial Sequence:  siNA sense region
uccugcucucuucaggagg

SEQ ID NO: 830 - RNA, 19 nt, Artificial Sequence
  Description of Artificial Sequence:  siNA sense region
gcccuggugucaggcaggu

SEQ ID NO: 831 - RNA, 19 nt, Artificial Sequence
  Description of Artificial Sequence:  siNA sense region
uuugccagugaagacuucu

SEQ ID NO: 832 - RNA, 19 nt, Artificial Sequence
  Description of Artificial Sequence:  siNA sense region
uuggguaguuuagauccca

SEQ ID NO: 833 - RNA, 19 nt, Artificial Sequence
  Description of Artificial Sequence:  siNA sense region
augucaccucagcugauau

SEQ ID NO: 834 - RNA, 19 nt, Artificial Sequence
  Description of Artificial Sequence:  siNA sense region
uuauggcaagugauaucac

SEQ ID NO: 835 - RNA, 19 nt, Artificial Sequence
  Description of Artificial Sequence:  siNA sense region
ccucucuucagccccuagu

SEQ ID NO: 836 - RNA, 19 nt, Artificial Sequence
  Description of Artificial Sequence:  siNA sense region
ugcuauucuguguugaaca

SEQ ID NO: 837 - RNA, 19 nt, Artificial Sequence
  Description of Artificial Sequence:  siNA sense region
acaauugauacuucaggug

SEQ ID NO: 838 - RNA, 19 nt, Artificial Sequence
  Description of Artificial Sequence:  siNA sense region
gcuuuugaugugaaaauca

SEQ ID NO: 839 - RNA, 19 nt, Artificial Sequence
  Description of Artificial Sequence:  siNA sense region
augaaaagaggaacaggug

SEQ ID NO: 840 - RNA, 19 nt, Artificial Sequence
  Description of Artificial Sequence:  siNA sense region
ggauguauagcauuuuuau

SEQ ID NO: 841 - RNA, 19 nt, Artificial Sequence
  Description of Artificial Sequence:  siNA sense region
uucaugccaucuguuuuca

SEQ ID NO: 842 - RNA, 19 nt, Artificial Sequence
  Description of Artificial Sequence:  siNA sense region
aaccaacuauuuuugagga

SEQ ID NO: 843 - RNA, 19 nt, Artificial Sequence
  Description of Artificial Sequence:  siNA sense region
aauuaucaugggaaaagac

SEQ ID NO: 844 - RNA, 19 nt, Artificial Sequence
  Description of Artificial Sequence:  siNA sense region
ccagggcuuuucccaggaa

SEQ ID NO: 845 - RNA, 19 nt, Artificial Sequence
  Description of Artificial Sequence:  siNA sense region
auaucccaaacuucggaaa

SEQ ID NO: 846 - RNA, 19 nt, Artificial Sequence
  Description of Artificial Sequence:  siNA sense region
acaaguuauucucuucacu

SEQ ID NO: 847 - RNA, 19 nt, Artificial Sequence
  Description of Artificial Sequence:  siNA sense region
ucccaauaacuaaugcuaa

SEQ ID NO: 848 - RNA, 19 nt, Artificial Sequence
  Description of Artificial Sequence:  siNA sense region
agaaaugcugaaaaucaaa

SEQ ID NO: 849 - RNA, 19 nt, Artificial Sequence
  Description of Artificial Sequence:  siNA sense region
aguaaaaaauuaaagccca

SEQ ID NO: 850 - RNA, 19 nt, Artificial Sequence
  Description of Artificial Sequence:  siNA sense region
auaaggccagaaacuccuu

SEQ ID NO: 851 - RNA, 19 nt, Artificial Sequence
  Description of Artificial Sequence:  siNA sense region
uuugcugucuuucucuaaa

SEQ ID NO: 852 - RNA, 19 nt, Artificial Sequence
  Description of Artificial Sequence:  siNA sense region
auaugauuacuuuaaaaua

SEQ ID NO: 853 - RNA, 19 nt, Artificial Sequence
  Description of Artificial Sequence:  siNA sense region
aaaaaaguaacaagguguc

SEQ ID NO: 854 - RNA, 19 nt, Artificial Sequence
  Description of Artificial Sequence:  siNA sense region
cuuuuccacuccuauggaa

SEQ ID NO: 855 - RNA, 19 nt, Artificial Sequence
  Description of Artificial Sequence:  siNA sense region
aaagggucuucuuggcagc

SEQ ID NO: 856 - RNA, 19 nt, Artificial Sequence
  Description of Artificial Sequence:  siNA sense region
cuuaacauugacuucuugg

SEQ ID NO: 857 - RNA, 19 nt, Artificial Sequence
  Description of Artificial Sequence:  siNA sense region
guuuggggagaaauaaauu

SEQ ID NO: 858 - RNA, 19 nt, Artificial Sequence
  Description of Artificial Sequence:  siNA sense region
uuuguuucagaauuuugua

SEQ ID NO: 859 - RNA, 19 nt, Artificial Sequence
  Description of Artificial Sequence:  siNA sense region
auauuguaggaaucccuuu

SEQ ID NO: 860 - RNA, 19 nt, Artificial Sequence
  Description of Artificial Sequence:  siNA sense region
ugagaaugugauuccuuuu

SEQ ID NO: 861 - RNA, 19 nt, Artificial Sequence
  Description of Artificial Sequence:  siNA sense region
ugauggggagaaagggcaa

SEQ ID NO: 862 - RNA, 19 nt, Artificial Sequence
  Description of Artificial Sequence:  siNA sense region
aauuauuuuaauauuuugu

SEQ ID NO: 863 - RNA, 19 nt, Artificial Sequence
  Description of Artificial Sequence:  siNA sense region
uauuuucaacuuuauaaag

SEQ ID NO: 864 - RNA, 19 nt, Artificial Sequence
  Description of Artificial Sequence:  siNA sense region
gauaaaauauccucagggg

SEQ ID NO: 865 - RNA, 19 nt, Artificial Sequence
  Description of Artificial Sequence:  siNA sense region
guggagaagugucguuuuc

SEQ ID NO: 866 - RNA, 19 nt, Artificial Sequence
  Description of Artificial Sequence:  siNA sense region
cauaacuugcugaauuuca

SEQ ID NO: 867 - RNA, 19 nt, Artificial Sequence
  Description of Artificial Sequence:  siNA sense region
aggcauuuuguucuacaug

SEQ ID NO: 868 - RNA, 19 nt, Artificial Sequence
  Description of Artificial Sequence:  siNA sense region
gaggacucauauauuuaag

SEQ ID NO: 869 - RNA, 19 nt, Artificial Sequence
  Description of Artificial Sequence:  siNA sense region
gccuuuuguguaauaagaa

SEQ ID NO: 870 - RNA, 19 nt, Artificial Sequence
  Description of Artificial Sequence:  siNA sense region
aaguauaaagucacuucca

SEQ ID NO: 871 - RNA, 19 nt, Artificial Sequence
  Description of Artificial Sequence:  siNA sense region
aguguuggcugugugacag

SEQ ID NO: 872 - RNA, 19 nt, Artificial Sequence
  Description of Artificial Sequence:  siNA sense region
gaaucuuguauuugggcca

SEQ ID NO: 873 - RNA, 19 nt, Artificial Sequence
  Description of Artificial Sequence:  siNA sense region
aagguguuuccauuucuca

SEQ ID NO: 874 - RNA, 19 nt, Artificial Sequence
  Description of Artificial Sequence:  siNA sense region
aaucagugcagugauacau

SEQ ID NO: 875 - RNA, 19 nt, Artificial Sequence
  Description of Artificial Sequence:  siNA sense region
uguacuccagagggacagg

SEQ ID NO: 876 - RNA, 19 nt, Artificial Sequence
  Description of Artificial Sequence:  siNA sense region
gguggacccccugagucaa

SEQ ID NO: 877 - RNA, 19 nt, Artificial Sequence
  Description of Artificial Sequence:  siNA sense region
acuggagcaagaaggaagg

SEQ ID NO: 878 - RNA, 19 nt, Artificial Sequence
  Description of Artificial Sequence:  siNA sense region
gaggcagacugauggcgau

SEQ ID NO: 879 - RNA, 19 nt, Artificial Sequence
  Description of Artificial Sequence:  siNA sense region
uucccucucacccgggacu

SEQ ID NO: 880 - RNA, 19 nt, Artificial Sequence
  Description of Artificial Sequence:  siNA sense region
ucucccccuuucaaggaaa

SEQ ID NO: 881 - RNA, 19 nt, Artificial Sequence
  Description of Artificial Sequence:  siNA sense region
agugaaccuuuaaaguaaa

SEQ ID NO: 882 - RNA, 19 nt, Artificial Sequence
  Description of Artificial Sequence:  siNA sense region
aggccucaucuccuuuauu

SEQ ID NO: 883 - RNA, 19 nt, Artificial Sequence
  Description of Artificial Sequence:  siNA sense region
ugcaguucaaauccucacc

SEQ ID NO: 884 - RNA, 19 nt, Artificial Sequence
  Description of Artificial Sequence:  siNA sense region
cauccacagcaagaugaau

SEQ ID NO: 885 - RNA, 19 nt, Artificial Sequence
  Description of Artificial Sequence:  siNA sense region
uuuuaucagccauguuugg

SEQ ID NO: 886 - RNA, 19 nt, Artificial Sequence
  Description of Artificial Sequence:  siNA sense region
guuguaaaugcucguguga

SEQ ID NO: 887 - RNA, 19 nt, Artificial Sequence
  Description of Artificial Sequence:  siNA sense region
auuuccuacagaaauacug

SEQ ID NO: 888 - RNA, 19 nt, Artificial Sequence
  Description of Artificial Sequence:  siNA sense region
gcucugaauauuuuguaau

SEQ ID NO: 889 - RNA, 19 nt, Artificial Sequence
  Description of Artificial Sequence:  siNA sense region
uaaaggucuuugcacaugu

SEQ ID NO: 890 - RNA, 19 nt, Artificial Sequence
  Description of Artificial Sequence:  siNA sense region
ugaccacauacguguuagg

SEQ ID NO: 891 - RNA, 19 nt, Artificial Sequence
  Description of Artificial Sequence:  siNA sense region
gaggcugcaugcucuggaa

SEQ ID NO: 892 - RNA, 19 nt, Artificial Sequence
  Description of Artificial Sequence:  siNA sense region
agccuggacucuaagcugg

SEQ ID NO: 893 - RNA, 19 nt, Artificial Sequence
  Description of Artificial Sequence:  siNA sense region
gagcucuuggaagagcucu

SEQ ID NO: 894 - RNA, 19 nt, Artificial Sequence
  Description of Artificial Sequence:  siNA sense region
uucgguuucugagcauaau

SEQ ID NO: 895 - RNA, 19 nt, Artificial Sequence
  Description of Artificial Sequence:  siNA sense region
ugcucccaucuccugauuu

SEQ ID NO: 896 - RNA, 19 nt, Artificial Sequence
  Description of Artificial Sequence:  siNA sense region
ucucugaacagaaaacaaa

SEQ ID NO: 897 - RNA, 19 nt, Artificial Sequence
  Description of Artificial Sequence:  siNA sense region
aagagagaaugagggaaau

SEQ ID NO: 898 - RNA, 19 nt, Artificial Sequence
  Description of Artificial Sequence:  siNA sense region
uugcuauuuuauuuguauu

SEQ ID NO: 899 - RNA, 19 nt, Artificial Sequence
  Description of Artificial Sequence:  siNA sense region
ucaugaacuuggcuguaau

SEQ ID NO: 900 - RNA, 19 nt, Artificial Sequence
  Description of Artificial Sequence:  siNA sense region
ucaguuaugccguauagga

SEQ ID NO: 901 - RNA, 19 nt, Artificial Sequence
  Description of Artificial Sequence:  siNA sense region
augucagacaauaccacug

SEQ ID NO: 902 - RNA, 19 nt, Artificial Sequence
  Description of Artificial Sequence:  siNA sense region
gguuaaaauaaagccuauu

SEQ ID NO: 903 - RNA, 19 nt, Artificial Sequence
  Description of Artificial Sequence:  siNA sense region
uaaagccuauuuuucaaau

SEQ ID NO: 904 - RNA, 19 nt, Artificial Sequence
  Description of Artificial Sequence:  siNA antisense region
ggcuccaguggucgcgguu

SEQ ID NO: 905 - RNA, 19 nt, Artificial Sequence
  Description of Artificial Sequence:  siNA antisense region
agcugcugcgcccgcuaag

SEQ ID NO: 906 - RNA, 19 nt, Artificial Sequence
  Description of Artificial Sequence:  siNA antisense region
ucgcaguacucccguucca

SEQ ID NO: 907 - RNA, 19 nt, Artificial Sequence
  Description of Artificial Sequence:  siNA antisense region
ggccgacuccgggcugcgu

SEQ ID NO: 908 - RNA, 19 nt, Artificial Sequence
  Description of Artificial Sequence:  siNA antisense region
gcaccuucgccccuacaag

SEQ ID NO: 909 - RNA, 19 nt, Artificial Sequence
  Description of Artificial Sequence:  siNA antisense region
gcccgccgcgaucucccug

SEQ ID NO: 910 - RNA, 19 nt, Artificial Sequence
  Description of Artificial Sequence:  siNA antisense region
uccggcgcucaagacugcg

SEQ ID NO: 911 - RNA, 19 nt, Artificial Sequence
  Description of Artificial Sequence:  siNA antisense region
cuaagggcagggacgcgcu

SEQ ID NO: 912 - RNA, 19 nt, Artificial Sequence
  Description of Artificial Sequence:  siNA antisense region
cgacuggggcaagccccgc

SEQ ID NO: 913 - RNA, 19 nt, Artificial Sequence
  Description of Artificial Sequence:  siNA antisense region
cggcuggaugugccccugc

SEQ ID NO: 914 - RNA, 19 nt, Artificial Sequence
  Description of Artificial Sequence:  siNA antisense region
ggcugcugucagccgcagc

SEQ ID NO: 915 - RNA, 19 nt, Artificial Sequence
  Description of Artificial Sequence:  siNA antisense region
gcagacucccgcgcgcgcg

SEQ ID NO: 916 - RNA, 19 nt, Artificial Sequence
  Description of Artificial Sequence:  siNA antisense region
ugcggcugccgcgaccccg

SEQ ID NO: 917 - RNA, 19 nt, Artificial Sequence
  Description of Artificial Sequence:  siNA antisense region
gcuggucgcccgcgcaggu

SEQ ID NO: 918 - RNA, 19 nt, Artificial Sequence
  Description of Artificial Sequence:  siNA antisense region
gccgggcggggaccuugcg

SEQ ID NO: 919 - RNA, 19 nt, Artificial Sequence
  Description of Artificial Sequence:  siNA antisense region
gcccuugcugcccgcccag

SEQ ID NO: 920 - RNA, 19 nt, Artificial Sequence
  Description of Artificial Sequence:  siNA antisense region
acccgcacccucuccccgg

SEQ ID NO: 921 - RNA, 19 nt, Artificial Sequence
  Description of Artificial Sequence:  siNA antisense region
uguggggcccccgccugca

SEQ ID NO: 922 - RNA, 19 nt, Artificial Sequence
  Description of Artificial Sequence:  siNA antisense region
cgggcaagaagguggcccu

SEQ ID NO: 923 - RNA, 19 nt, Artificial Sequence
  Description of Artificial Sequence:  siNA antisense region
uuuuccagcggcagccgcc

SEQ ID NO: 924 - RNA, 19 nt, Artificial Sequence
  Description of Artificial Sequence:  siNA antisense region
ugggccucuccugagacau

SEQ ID NO: 925 - RNA, 19 nt, Artificial Sequence
  Description of Artificial Sequence:  siNA antisense region
gcuccugccgguagaacgu

SEQ ID NO: 926 - RNA, 19 nt, Artificial Sequence
  Description of Artificial Sequence:  siNA antisense region
cccagauugucuuguucag

SEQ ID NO: 927 - RNA, 19 nt, Artificial Sequence
  Description of Artificial Sequence:  siNA antisense region
gguaacgcucgggcaccuc

SEQ ID NO: 928 - RNA, 19 nt, Artificial Sequence
  Description of Artificial Sequence:  siNA antisense region
ccacuggagacagguucug

SEQ ID NO: 929 - RNA, 19 nt, Artificial Sequence
  Description of Artificial Sequence:  siNA antisense region
agccauaggcgccagagcc

SEQ ID NO: 930 - RNA, 19 nt, Artificial Sequence
  Description of Artificial Sequence:  siNA antisense region
caaaagcagcacacacaga

SEQ ID NO: 931 - RNA, 19 nt, Artificial Sequence
  Description of Artificial Sequence:  siNA antisense region
guaaccccguuuuuguguc

SEQ ID NO: 932 - RNA, 19 nt, Artificial Sequence
  Description of Artificial Sequence:  siNA antisense region
gcuucuucacugccacacg

SEQ ID NO: 933 - RNA, 19 nt, Artificial Sequence
  Description of Artificial Sequence:  siNA antisense region
acugaaauggucuggagag

SEQ ID NO: 934 - RNA, 19 nt, Artificial Sequence
  Description of Artificial Sequence:  siNA antisense region
uuuucgcaugaaugaugga

SEQ ID NO: 935 - RNA, 19 nt, Artificial Sequence
  Description of Artificial Sequence:  siNA antisense region
gcaguucucuguagguucu

SEQ ID NO: 936 - RNA, 19 nt, Artificial Sequence
  Description of Artificial Sequence:  siNA antisense region
ucauauguuuaaguaaccg

SEQ ID NO: 937 - RNA, 19 nt, Artificial Sequence
  Description of Artificial Sequence:  siNA antisense region
caaucacauuuucauguuu

SEQ ID NO: 938 - RNA, 19 nt, Artificial Sequence
  Description of Artificial Sequence:  siNA antisense region
uaaaaacguccaacagacc

SEQ ID NO: 939 - RNA, 19 nt, Artificial Sequence
  Description of Artificial Sequence:  siNA antisense region
ccagagaccuugcaggugu

SEQ ID NO: 940 - RNA, 19 nt, Artificial Sequence
  Description of Artificial Sequence:  siNA antisense region
acacaucauugaauuccuc

SEQ ID NO: 941 - RNA, 19 nt, Artificial Sequence
  Description of Artificial Sequence:  siNA antisense region
ugagaugggucaccagaua

SEQ ID NO: 942 - RNA, 19 nt, Artificial Sequence
  Description of Artificial Sequence:  siNA antisense region
uguucagaucugcccccau

SEQ ID NO: 943 - RNA, 19 nt, Artificial Sequence
  Description of Artificial Sequence:  siNA antisense region
ucugacauuucacaauguu

SEQ ID NO: 944 - RNA, 19 nt, Artificial Sequence
  Description of Artificial Sequence:  siNA antisense region
cauggucaucuguaagcuu

SEQ ID NO: 945 - RNA, 19 nt, Artificial Sequence
  Description of Artificial Sequence:  siNA antisense region
gguagauaaggaacugaac

SEQ ID NO: 946 - RNA, 19 nt, Artificial Sequence
  Description of Artificial Sequence:  siNA antisense region
uuagaccucggagaauuug

SEQ ID NO: 947 - RNA, 19 nt, Artificial Sequence
  Description of Artificial Sequence:  siNA antisense region
cagcugaauguauauacuu

SEQ ID NO: 948 - RNA, 19 nt, Artificial Sequence
  Description of Artificial Sequence:  siNA antisense region
ggucccugugaauuauguc

SEQ ID NO: 949 - RNA, 19 nt, Artificial Sequence
  Description of Artificial Sequence:  siNA antisense region
cuagauuacuagguuuuag

SEQ ID NO: 950 - RNA, 19 nt, Artificial Sequence
  Description of Artificial Sequence:  siNA antisense region
cacagucuucauucacagc

SEQ ID NO: 951 - RNA, 19 nt, Artificial Sequence
  Description of Artificial Sequence:  siNA antisense region
aauccagaaucuucagcuc

SEQ ID NO: 952 - RNA, 19 nt, Artificial Sequence
  Description of Artificial Sequence:  siNA antisense region
ugugccgagccaguccaaa

SEQ ID NO: 953 - RNA, 19 nt, Artificial Sequence
  Description of Artificial Sequence:  siNA antisense region
cugucauuucaucaucugu

SEQ ID NO: 954 - RNA, 19 nt, Artificial Sequence
  Description of Artificial Sequence:  siNA antisense region
accuaguggccacguagcc

SEQ ID NO: 955 - RNA, 19 nt, Artificial Sequence
  Description of Artificial Sequence:  siNA antisense region
ucucaggagcccuguacca

SEQ ID NO: 956 - RNA, 19 nt, Artificial Sequence
  Description of Artificial Sequence:  siNA antisense region
gcauccaguucagcaugau

SEQ ID NO: 957 - RNA, 19 nt, Artificial Sequence
  Description of Artificial Sequence:  siNA antisense region
caacugucugguuguaaug

SEQ ID NO: 958 - RNA, 19 nt, Artificial Sequence
  Description of Artificial Sequence:  siNA antisense region
aucccacugaccaaauauc

SEQ ID NO: 959 - RNA, 19 nt, Artificial Sequence
  Description of Artificial Sequence:  siNA antisense region
acagcucggccauuaugca

SEQ ID NO: 960 - RNA, 19 nt, Artificial Sequence
  Description of Artificial Sequence:  siNA antisense region
acaauguucuuccagucaa

SEQ ID NO: 961 - RNA, 19 nt, Artificial Sequence
  Description of Artificial Sequence:  siNA antisense region
uauggucuguaccaggaaa

SEQ ID NO: 962 - RNA, 19 nt, Artificial Sequence
  Description of Artificial Sequence:  siNA antisense region
ugagcuucaacugaucaau

SEQ ID NO: 963 - RNA, 19 nt, Artificial Sequence
  Description of Artificial Sequence:  siNA antisense region
uuccaacgagucuuaaaau

SEQ ID NO: 964 - RNA, 19 nt, Artificial Sequence
  Description of Artificial Sequence:  siNA antisense region
aaagcucagccccuggggu

SEQ ID NO: 965 - RNA, 19 nt, Artificial Sequence
  Description of Artificial Sequence:  siNA antisense region
cugaggagauuuucuucaa

SEQ ID NO: 966 - RNA, 19 nt, Artificial Sequence
  Description of Artificial Sequence:  siNA antisense region
uauaguuucuugcagacuc

SEQ ID NO: 967 - RNA, 19 nt, Artificial Sequence
  Description of Artificial Sequence:  siNA antisense region
ucugagucaaagacugaau

SEQ ID NO: 968 - RNA, 19 nt, Artificial Sequence
  Description of Artificial Sequence:  siNA antisense region
caaaguucaucuucggcau

SEQ ID NO: 969 - RNA, 19 nt, Artificial Sequence
  Description of Artificial Sequence:  siNA antisense region
caccaauaaauacauucgc

SEQ ID NO: 970 - RNA, 19 nt, Artificial Sequence
  Description of Artificial Sequence:  siNA antisense region
cgacagccaggggauuggc

SEQ ID NO: 971 - RNA, 19 nt, Artificial Sequence
  Description of Artificial Sequence:  siNA antisense region
gcaucuucuccagcaaguc

SEQ ID NO: 972 - RNA, 19 nt, Artificial Sequence
  Description of Artificial Sequence:  siNA antisense region
uaucugaguccaauacaag

SEQ ID NO: 973 - RNA, 19 nt, Artificial Sequence
  Description of Artificial Sequence:  siNA antisense region
gggccgcuguaauucucuu

SEQ ID NO: 974 - RNA, 19 nt, Artificial Sequence
  Description of Artificial Sequence:  siNA antisense region
aggcaugugcaagggcuug

SEQ ID NO: 975 - RNA, 19 nt, Artificial Sequence
  Description of Artificial Sequence:  siNA antisense region
cgugguacugagcaaagua

SEQ ID NO: 976 - RNA, 19 nt, Artificial Sequence
  Description of Artificial Sequence:  siNA antisense region
cugguucaucaucaggauc

SEQ ID NO: 977 - RNA, 19 nt, Artificial Sequence
  Description of Artificial Sequence:  siNA antisense region
gaucauaaggaucggccac

SEQ ID NO: 978 - RNA, 19 nt, Artificial Sequence
  Description of Artificial Sequence:  siNA antisense region
cccugcuuucaaaggacug

SEQ ID NO: 979 - RNA, 19 nt, Artificial Sequence
  Description of Artificial Sequence:  siNA antisense region
acucaucuauaaggagguc

SEQ ID NO: 980 - RNA, 19 nt, Artificial Sequence
  Description of Artificial Sequence:  siNA antisense region
cauaggucaggcuuuucca

SEQ ID NO: 981 - RNA, 19 nt, Artificial Sequence
  Description of Artificial Sequence:  siNA antisense region
caaagcugaugacuucauc

SEQ ID NO: 982 - RNA, 19 nt, Artificial Sequence
  Description of Artificial Sequence:  siNA antisense region
ggucaaggggugguggcac

SEQ ID NO: 983 - RNA, 19 nt, Artificial Sequence
  Description of Artificial Sequence:  siNA antisense region
aggacuccaucucuucuug

SEQ ID NO: 984 - RNA, 19 nt, Artificial Sequence
  Description of Artificial Sequence:  siNA antisense region
aacagaaaccaggugcuca

SEQ ID NO: 985 - RNA, 19 nt, Artificial Sequence
  Description of Artificial Sequence:  siNA antisense region
gugaagugggaucaacaga

SEQ ID NO: 986 - RNA, 19 nt, Artificial Sequence
  Description of Artificial Sequence:  siNA antisense region
aaaggccuuccccucacag

SEQ ID NO: 987 - RNA, 19 nt, Artificial Sequence
  Description of Artificial Sequence:  siNA antisense region
uuuggagaguucccgugaa

SEQ ID NO: 988 - RNA, 19 nt, Artificial Sequence
  Description of Artificial Sequence:  siNA antisense region
agaggcacuugaauaauau

SEQ ID NO: 989 - RNA, 19 nt, Artificial Sequence
  Description of Artificial Sequence:  siNA antisense region
gaggaaaucucugcaacaa

SEQ ID NO: 990 - RNA, 19 nt, Artificial Sequence
  Description of Artificial Sequence:  siNA antisense region
acacccccuuccaccaugg

SEQ ID NO: 991 - RNA, 19 nt, Artificial Sequence
  Description of Artificial Sequence:  siNA antisense region
acgcacgcacacgcacgca

SEQ ID NO: 992 - RNA, 19 nt, Artificial Sequence
  Description of Artificial Sequence:  siNA antisense region
acaugcacacacacuaaca

SEQ ID NO: 993 - RNA, 19 nt, Artificial Sequence
  Description of Artificial Sequence:  siNA antisense region
ccacaaagacagacacaca

SEQ ID NO: 994 - RNA, 19 nt, Artificial Sequence
  Description of Artificial Sequence:  siNA antisense region
ucauauugucuuacccucc

SEQ ID NO: 995 - RNA, 19 nt, Artificial Sequence
  Description of Artificial Sequence:  siNA antisense region
acugugaucauaguuuguu

SEQ ID NO: 996 - RNA, 19 nt, Artificial Sequence
  Description of Artificial Sequence:  siNA antisense region
acaaccuccuguaaaguca

SEQ ID NO: 997 - RNA, 19 nt, Artificial Sequence
  Description of Artificial Sequence:  siNA antisense region
ggcugcccuggagcaucca

SEQ ID NO: 998 - RNA, 19 nt, Artificial Sequence
  Description of Artificial Sequence:  siNA antisense region
aaagaagagcaagguggag

SEQ ID NO: 999 - RNA, 19 nt, Artificial Sequence
  Description of Artificial Sequence:  siNA antisense region
gccugagccaacucucaga

SEQ ID NO: 1000 - RNA, 19 nt, Artificial Sequence
  Description of Artificial Sequence:  siNA antisense region
ggacagcagcucuugucug

SEQ ID NO: 1001 - RNA, 19 nt, Artificial Sequence
  Description of Artificial Sequence:  siNA antisense region
uugaacauauuccuaaaag

SEQ ID NO: 1002 - RNA, 19 nt, Artificial Sequence
  Description of Artificial Sequence:  siNA antisense region
auauuuuuuuacuuugcau

SEQ ID NO: 1003 - RNA, 19 nt, Artificial Sequence
  Description of Artificial Sequence:  siNA antisense region
cgggauuggggacaauuca

SEQ ID NO: 1004 - RNA, 19 nt, Artificial Sequence
  Description of Artificial Sequence:  siNA antisense region
aaguggcaaaagcaugacc

SEQ ID NO: 1005 - RNA, 19 nt, Artificial Sequence
  Description of Artificial Sequence:  siNA antisense region
gggucacaggagaagccaa

SEQ ID NO: 1006 - RNA, 19 nt, Artificial Sequence
  Description of Artificial Sequence:  siNA antisense region
cgccccaccgucaaggugg

SEQ ID NO: 1007 - RNA, 19 nt, Artificial Sequence
  Description of Artificial Sequence:  siNA antisense region
gggauguugucaagucuac

SEQ ID NO: 1008 - RNA, 19 nt, Artificial Sequence
  Description of Artificial Sequence:  siNA antisense region
uucucuccgugccacugug

SEQ ID NO: 1009 - RNA, 19 nt, Artificial Sequence
  Description of Artificial Sequence:  siNA antisense region
aaccagaagguaugggccu

SEQ ID NO: 1010 - RNA, 19 nt, Artificial Sequence
  Description of Artificial Sequence:  siNA antisense region
cggugucaggucugaagca

SEQ ID NO: 1011 - RNA, 19 nt, Artificial Sequence
  Description of Artificial Sequence:  siNA antisense region
guacguaucacugagggac

SEQ ID NO: 1012 - RNA, 19 nt, Artificial Sequence
  Description of Artificial Sequence:  siNA antisense region
aguugguccuuuuuggcug

SEQ ID NO: 1013 - RNA, 19 nt, Artificial Sequence
  Description of Artificial Sequence:  siNA antisense region
ggcuagugcacagaagcca

SEQ ID NO: 1014 - RNA, 19 nt, Artificial Sequence
  Description of Artificial Sequence:  siNA antisense region
cuaagcaaguuaaucacag

SEQ ID NO: 1015 - RNA, 19 nt, Artificial Sequence
  Description of Artificial Sequence:  siNA antisense region
caagaucugagaaccauac

SEQ ID NO: 1016 - RNA, 19 nt, Artificial Sequence
  Description of Artificial Sequence:  siNA antisense region
caguuucaaauauacuguc

SEQ ID NO: 1017 - RNA, 19 nt, Artificial Sequence
  Description of Artificial Sequence:  siNA antisense region
aaggcacaaacauauuuac

SEQ ID NO: 1018 - RNA, 19 nt, Artificial Sequence
  Description of Artificial Sequence:  siNA antisense region
acuuucuucucuccuuuua

SEQ ID NO: 1019 - RNA, 19 nt, Artificial Sequence
  Description of Artificial Sequence:  siNA antisense region
agucuuuuaacuaucuaca

SEQ ID NO: 1020 - RNA, 19 nt, Artificial Sequence
  Description of Artificial Sequence:  siNA antisense region
cagaacuucagcagcugca

SEQ ID NO: 1021 - RNA, 19 nt, Artificial Sequence
  Description of Artificial Sequence:  siNA antisense region
cucucgacuugcccggcuc

SEQ ID NO: 1022 - RNA, 19 nt, Artificial Sequence
  Description of Artificial Sequence:  siNA antisense region
agcagcuguccaacagccc

SEQ ID NO: 1023 - RNA, 19 nt, Artificial Sequence
  Description of Artificial Sequence:  siNA antisense region
gauuacuccgggcccacaa

SEQ ID NO: 1024 - RNA, 19 nt, Artificial Sequence
  Description of Artificial Sequence:  siNA antisense region
cgccuaugaaggcugccug

SEQ ID NO: 1025 - RNA, 19 nt, Artificial Sequence
  Description of Artificial Sequence:  siNA antisense region
cucacaugcacacaugacc

SEQ ID NO: 1026 - RNA, 19 nt, Artificial Sequence
  Description of Artificial Sequence:  siNA antisense region
cgcacauauacgcaugugc

SEQ ID NO: 1027 - RNA, 19 nt, Artificial Sequence
  Description of Artificial Sequence:  siNA antisense region
gugagggagaaagagagac

SEQ ID NO: 1028 - RNA, 19 nt, Artificial Sequence
  Description of Artificial Sequence:  siNA antisense region
aaauggcaacaccuggggg

SEQ ID NO: 1029 - RNA, 19 nt, Artificial Sequence
  Description of Artificial Sequence:  siNA antisense region
ggugaaggguaagcagaga

SEQ ID NO: 1030 - RNA, 19 nt, Artificial Sequence
  Description of Artificial Sequence:  siNA antisense region
agaaaccucugcaccaaag

SEQ ID NO: 1031 - RNA, 19 nt, Artificial Sequence
  Description of Artificial Sequence:  siNA antisense region
uacuggggcagauauucaa

SEQ ID NO: 1032 - RNA, 19 nt, Artificial Sequence
  Description of Artificial Sequence:  siNA antisense region
caagaaccugcuucugacu

SEQ ID NO: 1033 - RNA, 19 nt, Artificial Sequence
  Description of Artificial Sequence:  siNA antisense region
acaggaaguacaugacauc

SEQ ID NO: 1034 - RNA, 19 nt, Artificial Sequence
  Description of Artificial Sequence:  siNA antisense region
gcuagaaauaaagaguaca

SEQ ID NO: 1035 - RNA, 19 nt, Artificial Sequence
  Description of Artificial Sequence:  siNA antisense region
aaaacacauccucacucug

SEQ ID NO: 1036 - RNA, 19 nt, Artificial Sequence
  Description of Artificial Sequence:  siNA antisense region
ucaaauagcaagacgugca

SEQ ID NO: 1037 - RNA, 19 nt, Artificial Sequence
  Description of Artificial Sequence:  siNA antisense region
acaagcagcugugcaugcu

SEQ ID NO: 1038 - RNA, 19 nt, Artificial Sequence
  Description of Artificial Sequence:  siNA antisense region
ccuccugaagagagcagga

SEQ ID NO: 1039 - RNA, 19 nt, Artificial Sequence
  Description of Artificial Sequence:  siNA antisense region
accugccugacaccagggc

SEQ ID NO: 1040 - RNA, 19 nt, Artificial Sequence
  Description of Artificial Sequence:  siNA antisense region
agaagucuucacuggcaaa

SEQ ID NO: 1041 - RNA, 19 nt, Artificial Sequence
  Description of Artificial Sequence:  siNA antisense region
ugggaucuaaacuacccaa

SEQ ID NO: 1042 - RNA, 19 nt, Artificial Sequence
  Description of Artificial Sequence:  siNA antisense region
auaucagcugaggugacau

SEQ ID NO: 1043 - RNA, 19 nt, Artificial Sequence
  Description of Artificial Sequence:  siNA antisense region
gugauaucacuugccauaa

SEQ ID NO: 1044 - RNA, 19 nt, Artificial Sequence
  Description of Artificial Sequence:  siNA antisense region
acuaggggcugaagagagg

SEQ ID NO: 1045 - RNA, 19 nt, Artificial Sequence
  Description of Artificial Sequence:  siNA antisense region
uguucaacacagaauagca

SEQ ID NO: 1046 - RNA, 19 nt, Artificial Sequence
  Description of Artificial Sequence:  siNA antisense region
caccugaaguaucaauugu

SEQ ID NO: 1047 - RNA, 19 nt, Artificial Sequence
  Description of Artificial Sequence:  siNA antisense region
ugauuuucacaucaaaagc

SEQ ID NO: 1048 - RNA, 19 nt, Artificial Sequence
  Description of Artificial Sequence:  siNA antisense region
caccuguuccucuuuucau

SEQ ID NO: 1049 - RNA, 19 nt, Artificial Sequence
  Description of Artificial Sequence:  siNA antisense region
auaaaaaugcuauacaucc

SEQ ID NO: 1050 - RNA, 19 nt, Artificial Sequence
  Description of Artificial Sequence:  siNA antisense region
ugaaaacagauggcaugaa

SEQ ID NO: 1051 - RNA, 19 nt, Artificial Sequence
  Description of Artificial Sequence:  siNA antisense region
uccucaaaaauaguugguu

SEQ ID NO: 1052 - RNA, 19 nt, Artificial Sequence
  Description of Artificial Sequence:  siNA antisense region
gucuuuucccaugauaauu

SEQ ID NO: 1053 - RNA, 19 nt, Artificial Sequence
  Description of Artificial Sequence:  siNA antisense region
uuccugggaaaagcccugg

SEQ ID NO: 1054 - RNA, 19 nt, Artificial Sequence
  Description of Artificial Sequence:  siNA antisense region
uuuccgaaguuugggauau

SEQ ID NO: 1055 - RNA, 19 nt, Artificial Sequence
  Description of Artificial Sequence:  siNA antisense region
agugaagagaauaacuugu

SEQ ID NO: 1056 - RNA, 19 nt, Artificial Sequence
  Description of Artificial Sequence:  siNA antisense region
uuagcauuaguuauuggga

SEQ ID NO: 1057 - RNA, 19 nt, Artificial Sequence
  Description of Artificial Sequence:  siNA antisense region
uuugauuuucagcauuucu

SEQ ID NO: 1058 - RNA, 19 nt, Artificial Sequence
  Description of Artificial Sequence:  siNA antisense region
ugggcuuuaauuuuuuacu

SEQ ID NO: 1059 - RNA, 19 nt, Artificial Sequence
  Description of Artificial Sequence:  siNA antisense region
aaggaguuucuggccuuau

SEQ ID NO: 1060 - RNA, 19 nt, Artificial Sequence
  Description of Artificial Sequence:  siNA antisense region
uuuagagaaagacagcaaa

SEQ ID NO: 1061 - RNA, 19 nt, Artificial Sequence
  Description of Artificial Sequence:  siNA antisense region
uauuuuaaaguaaucauau

SEQ ID NO: 1062 - RNA, 19 nt, Artificial Sequence
  Description of Artificial Sequence:  siNA antisense region
gacaccuuguuacuuuuuu

SEQ ID NO: 1063 - RNA, 19 nt, Artificial Sequence
  Description of Artificial Sequence:  siNA antisense region
uuccauaggaguggaaaag

SEQ ID NO: 1064 - RNA, 19 nt, Artificial Sequence
  Description of Artificial Sequence:  siNA antisense region
gcugccaagaagacccuuu

SEQ ID NO: 1065 - RNA, 19 nt, Artificial Sequence
  Description of Artificial Sequence:  siNA antisense region
ccaagaagucaauguuaag

SEQ ID NO: 1066 - RNA, 19 nt, Artificial Sequence
  Description of Artificial Sequence:  siNA antisense region
aauuuauuucuccccaaac

SEQ ID NO: 1067 - RNA, 19 nt, Artificial Sequence
  Description of Artificial Sequence:  siNA antisense region
uacaaaauucugaaacaaa

SEQ ID NO: 1068 - RNA, 19 nt, Artificial Sequence
  Description of Artificial Sequence:  siNA antisense region
aaagggauuccuacaauau

SEQ ID NO: 1069 - RNA, 19 nt, Artificial Sequence
  Description of Artificial Sequence:  siNA antisense region
aaaaggaaucacauucuca

SEQ ID NO: 1070 - RNA, 19 nt, Artificial Sequence
  Description of Artificial Sequence:  siNA antisense region
uugcccuuucuccccauca

SEQ ID NO: 1071 - RNA, 19 nt, Artificial Sequence
  Description of Artificial Sequence:  siNA antisense region
acaaaauauuaaaauaauu

SEQ ID NO: 1072 - RNA, 19 nt, Artificial Sequence
  Description of Artificial Sequence:  siNA antisense region
cuuuauaaaguugaaaaua

SEQ ID NO: 1073 - RNA, 19 nt, Artificial Sequence
  Description of Artificial Sequence:  siNA antisense region
ccccugaggauauuuuauc

SEQ ID NO: 1074 - RNA, 19 nt, Artificial Sequence
  Description of Artificial Sequence:  siNA antisense region
gaaaacgacacuucuccac

SEQ ID NO: 1075 - RNA, 19 nt, Artificial Sequence
  Description of Artificial Sequence:  siNA antisense region
ugaaauucagcaaguuaug

SEQ ID NO: 1076 - RNA, 19 nt, Artificial Sequence
  Description of Artificial Sequence:  siNA antisense region
cauguagaacaaaaugccu

SEQ ID NO: 1077 - RNA, 19 nt, Artificial Sequence
  Description of Artificial Sequence:  siNA antisense region
cuuaaauauaugaguccuc

SEQ ID NO: 1078 - RNA, 19 nt, Artificial Sequence
  Description of Artificial Sequence:  siNA antisense region
uucuuauuacacaaaaggc

SEQ ID NO: 1079 - RNA, 19 nt, Artificial Sequence
  Description of Artificial Sequence:  siNA antisense region
uggaagugacuuuauacuu

SEQ ID NO: 1080 - RNA, 19 nt, Artificial Sequence
  Description of Artificial Sequence:  siNA antisense region
cugucacacagccaacacu

SEQ ID NO: 1081 - RNA, 19 nt, Artificial Sequence
  Description of Artificial Sequence:  siNA antisense region
uggcccaaauacaagauuc

SEQ ID NO: 1082 - RNA, 19 nt, Artificial Sequence
  Description of Artificial Sequence:  siNA antisense region
ugagaaauggaaacaccuu

SEQ ID NO: 1083 - RNA, 19 nt, Artificial Sequence
  Description of Artificial Sequence:  siNA antisense region
auguaucacugcacugauu

SEQ ID NO: 1084 - RNA, 19 nt, Artificial Sequence
  Description of Artificial Sequence:  siNA antisense region
ccugucccucuggaguaca

SEQ ID NO: 1085 - RNA, 19 nt, Artificial Sequence
  Description of Artificial Sequence:  siNA antisense region
uugacucaggggguccacc

SEQ ID NO: 1086 - RNA, 19 nt, Artificial Sequence
  Description of Artificial Sequence:  siNA antisense region
ccuuccuucuugcuccagu

SEQ ID NO: 1087 - RNA, 19 nt, Artificial Sequence
  Description of Artificial Sequence:  siNA antisense region
aucgccaucagucugccuc

SEQ ID NO: 1088 - RNA, 19 nt, Artificial Sequence
  Description of Artificial Sequence:  siNA antisense region
agucccgggugagagggaa

SEQ ID NO: 1089 - RNA, 19 nt, Artificial Sequence
  Description of Artificial Sequence:  siNA antisense region
uuuccuugaaagggggaga

SEQ ID NO: 1090 - RNA, 19 nt, Artificial Sequence
  Description of Artificial Sequence:  siNA antisense region
uuuacuuuaaagguucacu

SEQ ID NO: 1091 - RNA, 19 nt, Artificial Sequence
  Description of Artificial Sequence:  siNA antisense region
aauaaaggagaugaggccu

SEQ ID NO: 1092 - RNA, 19 nt, Artificial Sequence
  Description of Artificial Sequence:  siNA antisense region
ggugaggauuugaacugca

SEQ ID NO: 1093 - RNA, 19 nt, Artificial Sequence
  Description of Artificial Sequence:  siNA antisense region
auucaucuugcuguggaug

SEQ ID NO: 1094 - RNA, 19 nt, Artificial Sequence
  Description of Artificial Sequence:  siNA antisense region
ccaaacauggcugauaaaa

SEQ ID NO: 1095 - RNA, 19 nt, Artificial Sequence
  Description of Artificial Sequence:  siNA antisense region
ucacacgagcauuuacaac

SEQ ID NO: 1096 - RNA, 19 nt, Artificial Sequence
  Description of Artificial Sequence:  siNA antisense region
caguauuucuguaggaaau

SEQ ID NO: 1097 - RNA, 19 nt, Artificial Sequence
  Description of Artificial Sequence:  siNA antisense region
auuacaaaauauucagagc

SEQ ID NO: 1098 - RNA, 19 nt, Artificial Sequence
  Description of Artificial Sequence:  siNA antisense region
acaugugcaaagaccuuua

SEQ ID NO: 1099 - RNA, 19 nt, Artificial Sequence
  Description of Artificial Sequence:  siNA antisense region
ccuaacacguaugugguca

SEQ ID NO: 1100 - RNA, 19 nt, Artificial Sequence
  Description of Artificial Sequence:  siNA antisense region
uuccagagcaugcagccuc

SEQ ID NO: 1101 - RNA, 19 nt, Artificial Sequence
  Description of Artificial Sequence:  siNA antisense region
ccagcuuagaguccaggcu

SEQ ID NO: 1102 - RNA, 19 nt, Artificial Sequence
  Description of Artificial Sequence:  siNA antisense region
agagcucuuccaagagcuc

SEQ ID NO: 1103 - RNA, 19 nt, Artificial Sequence
  Description of Artificial Sequence:  siNA antisense region
auuaugcucagaaaccgaa

SEQ ID NO: 1104 - RNA, 19 nt, Artificial Sequence
  Description of Artificial Sequence:  siNA antisense region
aaaucaggagaugggagca

SEQ ID NO: 1105 - RNA, 19 nt, Artificial Sequence
  Description of Artificial Sequence:  siNA antisense region
uuuguuuucuguucagaga

SEQ ID NO: 1106 - RNA, 19 nt, Artificial Sequence
  Description of Artificial Sequence:  siNA antisense region
auuucccucauucucucuu

SEQ ID NO: 1107 - RNA, 19 nt, Artificial Sequence
  Description of Artificial Sequence:  siNA antisense region
aauacaaauaaaauagcaa

SEQ ID NO: 1108 - RNA, 19 nt, Artificial Sequence
  Description of Artificial Sequence:  siNA antisense region
auuacagccaaguucauga

SEQ ID NO: 1109 - RNA, 19 nt, Artificial Sequence
  Description of Artificial Sequence:  siNA antisense region
uccuauacggcauaacuga

SEQ ID NO: 1110 - RNA, 19 nt, Artificial Sequence
  Description of Artificial Sequence:  siNA antisense region
cagugguauugucugacau

SEQ ID NO: 1111 - RNA, 19 nt, Artificial Sequence
  Description of Artificial Sequence:  siNA antisense region
aauaggcuuuauuuuaacc

SEQ ID NO: 1112 - RNA, 19 nt, Artificial Sequence
  Description of Artificial Sequence:  siNA antisense region
auuugaaaaauaggcuuua

SEQ ID NO: 1113 - RNA, 19 nt, Artificial Sequence
  Description of Artificial Sequence:  siNA sense region
aguugcacugaguguggcu

SEQ ID NO: 1114 - RNA, 19 nt, Artificial Sequence
  Description of Artificial Sequence:  siNA sense region
ugaagcagcgaggcgggag

SEQ ID NO: 1115 - RNA, 19 nt, Artificial Sequence
  Description of Artificial Sequence:  siNA sense region
guggaggugcgcggaguca

SEQ ID NO: 1116 - RNA, 19 nt, Artificial Sequence
  Description of Artificial Sequence:  siNA sense region
aggcagacagacagacaca

SEQ ID NO: 1117 - RNA, 19 nt, Artificial Sequence
  Description of Artificial Sequence:  siNA sense region
agccagccagccaggucgg

SEQ ID NO: 1118 - RNA, 19 nt, Artificial Sequence
  Description of Artificial Sequence:  siNA sense region
gcaguauaguccgaacugc

SEQ ID NO: 1119 - RNA, 19 nt, Artificial Sequence
  Description of Artificial Sequence:  siNA sense region
caaaucuuauuuucuuuuc

SEQ ID NO: 1120 - RNA, 19 nt, Artificial Sequence
  Description of Artificial Sequence:  siNA sense region
caccuucucucuaacugcc

SEQ ID NO: 1121 - RNA, 19 nt, Artificial Sequence
  Description of Artificial Sequence:  siNA sense region
ccagagcuagcgccugugg

SEQ ID NO: 1122 - RNA, 19 nt, Artificial Sequence
  Description of Artificial Sequence:  siNA sense region
gcucccgggcuggugguuc

SEQ ID NO: 1123 - RNA, 19 nt, Artificial Sequence
  Description of Artificial Sequence:  siNA sense region
cgggaguguccagagagcc

SEQ ID NO: 1124 - RNA, 19 nt, Artificial Sequence
  Description of Artificial Sequence:  siNA sense region
cuugucuccagccggcccc

SEQ ID NO: 1125 - RNA, 19 nt, Artificial Sequence
  Description of Artificial Sequence:  siNA sense region
cgggaggagagcccugcug

SEQ ID NO: 1126 - RNA, 19 nt, Artificial Sequence
  Description of Artificial Sequence:  siNA sense region
gcccaggcgcuguugacag

SEQ ID NO: 1127 - RNA, 19 nt, Artificial Sequence
  Description of Artificial Sequence:  siNA sense region
gcggcggaaagcagcggua

SEQ ID NO: 1128 - RNA, 19 nt, Artificial Sequence
  Description of Artificial Sequence:  siNA sense region
accccacgcgcccgccggg

SEQ ID NO: 1129 - RNA, 19 nt, Artificial Sequence
  Description of Artificial Sequence:  siNA sense region
gggacgucggcgagcggcu

SEQ ID NO: 1130 - RNA, 19 nt, Artificial Sequence
  Description of Artificial Sequence:  siNA sense region
ugcagcagcaaagaacuuu

SEQ ID NO: 1131 - RNA, 19 nt, Artificial Sequence
  Description of Artificial Sequence:  siNA sense region
ucccggcggggaggaccgg

SEQ ID NO: 1132 - RNA, 19 nt, Artificial Sequence
  Description of Artificial Sequence:  siNA sense region
gagacaaguggcagagucc

SEQ ID NO: 1133 - RNA, 19 nt, Artificial Sequence
  Description of Artificial Sequence:  siNA sense region
ccggagcgaacuuuugcaa

SEQ ID NO: 1134 - RNA, 19 nt, Artificial Sequence
  Description of Artificial Sequence:  siNA sense region
agccuuuccugcgucuuag

SEQ ID NO: 1135 - RNA, 19 nt, Artificial Sequence
  Description of Artificial Sequence:  siNA sense region
ggcuucuccacggcgguaa

SEQ ID NO: 1136 - RNA, 19 nt, Artificial Sequence
  Description of Artificial Sequence:  siNA sense region
aagaccagaaggcggcgga

SEQ ID NO: 1137 - RNA, 19 nt, Artificial Sequence
  Description of Artificial Sequence:  siNA sense region
agagccacgcaagagaaga

SEQ ID NO: 1138 - RNA, 19 nt, Artificial Sequence
  Description of Artificial Sequence:  siNA sense region
aaggacgugcgcucagcuu

SEQ ID NO: 1139 - RNA, 19 nt, Artificial Sequence
  Description of Artificial Sequence:  siNA sense region
ucgcucgcaccgguuguug

SEQ ID NO: 1140 - RNA, 19 nt, Artificial Sequence
  Description of Artificial Sequence:  siNA sense region
gaacuugggcgagcgcgag

SEQ ID NO: 1141 - RNA, 19 nt, Artificial Sequence
  Description of Artificial Sequence:  siNA sense region
gccgcggcugccgggcgcc

SEQ ID NO: 1142 - RNA, 19 nt, Artificial Sequence
  Description of Artificial Sequence:  siNA sense region
ccccucccccuagcagcgg

SEQ ID NO: 1143 - RNA, 19 nt, Artificial Sequence
  Description of Artificial Sequence:  siNA sense region
gaggaggggacaagucguc

SEQ ID NO: 1144 - RNA, 19 nt, Artificial Sequence
  Description of Artificial Sequence:  siNA sense region
cggaguccgggcggccaag

SEQ ID NO: 1145 - RNA, 19 nt, Artificial Sequence
  Description of Artificial Sequence:  siNA sense region
gacccgccgccggccggcc

SEQ ID NO: 1146 - RNA, 19 nt, Artificial Sequence
  Description of Artificial Sequence:  siNA sense region
cacugcaggguccgcacug

SEQ ID NO: 1147 - RNA, 19 nt, Artificial Sequence
  Description of Artificial Sequence:  siNA sense region
gauccgcuccgcggggaga

SEQ ID NO: 1148 - RNA, 19 nt, Artificial Sequence
  Description of Artificial Sequence:  siNA sense region
agccgcugcucugggaagu

SEQ ID NO: 1149 - RNA, 19 nt, Artificial Sequence
  Description of Artificial Sequence:  siNA sense region
ugaguucgccugcggacuc

SEQ ID NO: 1150 - RNA, 19 nt, Artificial Sequence
  Description of Artificial Sequence:  siNA sense region
ccgaggaaccgcugcgccc

SEQ ID NO: 1151 - RNA, 19 nt, Artificial Sequence
  Description of Artificial Sequence:  siNA sense region
cgaagagcgcucagugagu

SEQ ID NO: 1152 - RNA, 19 nt, Artificial Sequence
  Description of Artificial Sequence:  siNA sense region
ugaccgcgacuuuucaaag

SEQ ID NO: 1153 - RNA, 19 nt, Artificial Sequence
  Description of Artificial Sequence:  siNA sense region
gccggguagcgcgcgcgag

SEQ ID NO: 1154 - RNA, 19 nt, Artificial Sequence
  Description of Artificial Sequence:  siNA sense region
gucgacaaguaagagugcg

SEQ ID NO: 1155 - RNA, 19 nt, Artificial Sequence
  Description of Artificial Sequence:  siNA sense region
gggaggcaucuuaauuaac

SEQ ID NO: 1156 - RNA, 19 nt, Artificial Sequence
  Description of Artificial Sequence:  siNA sense region
cccugcgcucccuggagcg

SEQ ID NO: 1157 - RNA, 19 nt, Artificial Sequence
  Description of Artificial Sequence:  siNA sense region
gagcuggugaggagggcgc

SEQ ID NO: 1158 - RNA, 19 nt, Artificial Sequence
  Description of Artificial Sequence:  siNA sense region
cagcggggacgacagccag

SEQ ID NO: 1159 - RNA, 19 nt, Artificial Sequence
  Description of Artificial Sequence:  siNA sense region
gcgggugcgugcgcucuua

SEQ ID NO: 1160 - RNA, 19 nt, Artificial Sequence
  Description of Artificial Sequence:  siNA sense region
agagaaacuuucccuguca

SEQ ID NO: 1161 - RNA, 19 nt, Artificial Sequence
  Description of Artificial Sequence:  siNA sense region
aaaggcuccggggggcgcg

SEQ ID NO: 1162 - RNA, 19 nt, Artificial Sequence
  Description of Artificial Sequence:  siNA sense region
gggugucccccgcuugcca

SEQ ID NO: 1163 - RNA, 19 nt, Artificial Sequence
  Description of Artificial Sequence:  siNA sense region
agagcccuguugcggcccc

SEQ ID NO: 1164 - RNA, 19 nt, Artificial Sequence
  Description of Artificial Sequence:  siNA sense region
cgaaacuugugcgcgcacg

SEQ ID NO: 1165 - RNA, 19 nt, Artificial Sequence
  Description of Artificial Sequence:  siNA sense region
gccaaacuaaccucacgug

SEQ ID NO: 1166 - RNA, 19 nt, Artificial Sequence
  Description of Artificial Sequence:  siNA sense region
gaagugacggacuguucua

SEQ ID NO: 1167 - RNA, 19 nt, Artificial Sequence
  Description of Artificial Sequence:  siNA sense region
augacugcaaagauggaaa

SEQ ID NO: 1168 - RNA, 19 nt, Artificial Sequence
  Description of Artificial Sequence:  siNA sense region
acgaccuucuaugacgaug

SEQ ID NO: 1169 - RNA, 19 nt, Artificial Sequence
  Description of Artificial Sequence:  siNA sense region
gcccucaacgccucguucc

SEQ ID NO: 1170 - RNA, 19 nt, Artificial Sequence
  Description of Artificial Sequence:  siNA sense region
cucccguccgagagcggac

SEQ ID NO: 1171 - RNA, 19 nt, Artificial Sequence
  Description of Artificial Sequence:  siNA sense region
ccuuauggcuacaguaacc

SEQ ID NO: 1172 - RNA, 19 nt, Artificial Sequence
  Description of Artificial Sequence:  siNA sense region
cccaagauccugaaacaga

SEQ ID NO: 1173 - RNA, 19 nt, Artificial Sequence
  Description of Artificial Sequence:  siNA sense region
agcaugacccugaaccugg

SEQ ID NO: 1174 - RNA, 19 nt, Artificial Sequence
  Description of Artificial Sequence:  siNA sense region
gccgacccaguggggagcc

SEQ ID NO: 1175 - RNA, 19 nt, Artificial Sequence
  Description of Artificial Sequence:  siNA sense region
cugaagccgcaccuccgcg

SEQ ID NO: 1176 - RNA, 19 nt, Artificial Sequence
  Description of Artificial Sequence:  siNA sense region
gccaagaacucggaccucc

SEQ ID NO: 1177 - RNA, 19 nt, Artificial Sequence
  Description of Artificial Sequence:  siNA sense region
cucaccucgcccgacgugg

SEQ ID NO: 1178 - RNA, 19 nt, Artificial Sequence
  Description of Artificial Sequence:  siNA sense region
gggcugcucaagcuggcgu

SEQ ID NO: 1179 - RNA, 19 nt, Artificial Sequence
  Description of Artificial Sequence:  siNA sense region
ucgcccgagcuggagcgcc

SEQ ID NO: 1180 - RNA, 19 nt, Artificial Sequence
  Description of Artificial Sequence:  siNA sense region
cugauaauccaguccagca

SEQ ID NO: 1181 - RNA, 19 nt, Artificial Sequence
  Description of Artificial Sequence:  siNA sense region
aacgggcacaucaccacca

SEQ ID NO: 1182 - RNA, 19 nt, Artificial Sequence
  Description of Artificial Sequence:  siNA sense region
acgccgacccccacccagu

SEQ ID NO: 1183 - RNA, 19 nt, Artificial Sequence
  Description of Artificial Sequence:  siNA sense region
uuccugugccccaagaacg

SEQ ID NO: 1184 - RNA, 19 nt, Artificial Sequence
  Description of Artificial Sequence:  siNA sense region
gugacagaugagcaggagg

SEQ ID NO: 1185 - RNA, 19 nt, Artificial Sequence
  Description of Artificial Sequence:  siNA sense region
ggguucgccgagggcuucg

SEQ ID NO: 1186 - RNA, 19 nt, Artificial Sequence
  Description of Artificial Sequence:  siNA sense region
gugcgcgcccuggccgaac

SEQ ID NO: 1187 - RNA, 19 nt, Artificial Sequence
  Description of Artificial Sequence:  siNA sense region
cugcacagccagaacacgc

SEQ ID NO: 1188 - RNA, 19 nt, Artificial Sequence
  Description of Artificial Sequence:  siNA sense region
cugcccagcgucacgucgg

SEQ ID NO: 1189 - RNA, 19 nt, Artificial Sequence
  Description of Artificial Sequence:  siNA sense region
gcggcgcagccggucaacg

SEQ ID NO: 1190 - RNA, 19 nt, Artificial Sequence
  Description of Artificial Sequence:  siNA sense region
ggggcaggcaugguggcuc

SEQ ID NO: 1191 - RNA, 19 nt, Artificial Sequence
  Description of Artificial Sequence:  siNA sense region
cccgcgguagccucggugg

SEQ ID NO: 1192 - RNA, 19 nt, Artificial Sequence
  Description of Artificial Sequence:  siNA sense region
gcagggggcagcggcagcg

SEQ ID NO: 1193 - RNA, 19 nt, Artificial Sequence
  Description of Artificial Sequence:  siNA sense region
ggcggcuucagcgccagcc

SEQ ID NO: 1194 - RNA, 19 nt, Artificial Sequence
  Description of Artificial Sequence:  siNA sense region
cugcacagcgagccgccgg

SEQ ID NO: 1195 - RNA, 19 nt, Artificial Sequence
  Description of Artificial Sequence:  siNA sense region
gucuacgcaaaccucagca

SEQ ID NO: 1196 - RNA, 19 nt, Artificial Sequence
  Description of Artificial Sequence:  siNA sense region
aacuucaacccaggcgcgc

SEQ ID NO: 1197 - RNA, 19 nt, Artificial Sequence
  Description of Artificial Sequence:  siNA sense region
cugagcagcggcggcgggg

SEQ ID NO: 1198 - RNA, 19 nt, Artificial Sequence
  Description of Artificial Sequence:  siNA sense region
gcgcccuccuacggcgcgg

SEQ ID NO: 1199 - RNA, 19 nt, Artificial Sequence
  Description of Artificial Sequence:  siNA sense region
gccggccuggccuuucccg

SEQ ID NO: 1200 - RNA, 19 nt, Artificial Sequence
  Description of Artificial Sequence:  siNA sense region
gcgcaaccccagcagcagc

SEQ ID NO: 1201 - RNA, 19 nt, Artificial Sequence
  Description of Artificial Sequence:  siNA sense region
cagcagccgccgcaccacc

SEQ ID NO: 1202 - RNA, 19 nt, Artificial Sequence
  Description of Artificial Sequence:  siNA sense region
cugccccagcagaugcccg

SEQ ID NO: 1203 - RNA, 19 nt, Artificial Sequence
  Description of Artificial Sequence:  siNA sense region
gugcagcacccgcggcugc

SEQ ID NO: 1204 - RNA, 19 nt, Artificial Sequence
  Description of Artificial Sequence:  siNA sense region
caggcccugaaggaggagc

SEQ ID NO: 1205 - RNA, 19 nt, Artificial Sequence
  Description of Artificial Sequence:  siNA sense region
ccucagacagugcccgaga

SEQ ID NO: 1206 - RNA, 19 nt, Artificial Sequence
  Description of Artificial Sequence:  siNA sense region
augcccggcgagacaccgc

SEQ ID NO: 1207 - RNA, 19 nt, Artificial Sequence
  Description of Artificial Sequence:  siNA sense region
ccccugucccccaucgaca

SEQ ID NO: 1208 - RNA, 19 nt, Artificial Sequence
  Description of Artificial Sequence:  siNA sense region
auggagucccaggagcgga

SEQ ID NO: 1209 - RNA, 19 nt, Artificial Sequence
  Description of Artificial Sequence:  siNA sense region
aucaaggcggagaggaagc

SEQ ID NO: 1210 - RNA, 19 nt, Artificial Sequence
  Description of Artificial Sequence:  siNA sense region
cgcaugaggaaccgcaucg

SEQ ID NO: 1211 - RNA, 19 nt, Artificial Sequence
  Description of Artificial Sequence:  siNA sense region
gcugccuccaagugccgaa

SEQ ID NO: 1212 - RNA, 19 nt, Artificial Sequence
  Description of Artificial Sequence:  siNA sense region
aaaaggaagcuggagagaa

SEQ ID NO: 1213 - RNA, 19 nt, Artificial Sequence
  Description of Artificial Sequence:  siNA sense region
aucgcccggcuggaggaaa

SEQ ID NO: 1214 - RNA, 19 nt, Artificial Sequence
  Description of Artificial Sequence:  siNA sense region
aaagugaaaaccuugaaag

SEQ ID NO: 1215 - RNA, 19 nt, Artificial Sequence
  Description of Artificial Sequence:  siNA sense region
gcucagaacucggagcugg

SEQ ID NO: 1216 - RNA, 19 nt, Artificial Sequence
  Description of Artificial Sequence:  siNA sense region
gcguccacggccaacaugc

SEQ ID NO: 1217 - RNA, 19 nt, Artificial Sequence
  Description of Artificial Sequence:  siNA sense region
cucagggaacagguggcac

SEQ ID NO: 1218 - RNA, 19 nt, Artificial Sequence
  Description of Artificial Sequence:  siNA sense region
cagcuuaaacagaaaguca

SEQ ID NO: 1219 - RNA, 19 nt, Artificial Sequence
  Description of Artificial Sequence:  siNA sense region
augaaccacguuaacagug

SEQ ID NO: 1220 - RNA, 19 nt, Artificial Sequence
  Description of Artificial Sequence:  siNA sense region
gggugccaacucaugcuaa

SEQ ID NO: 1221 - RNA, 19 nt, Artificial Sequence
  Description of Artificial Sequence:  siNA sense region
acgcagcaguugcaaacau

SEQ ID NO: 1222 - RNA, 19 nt, Artificial Sequence
  Description of Artificial Sequence:  siNA sense region
uuuugaagagagaccgucg

SEQ ID NO: 1223 - RNA, 19 nt, Artificial Sequence
  Description of Artificial Sequence:  siNA sense region
gggggcugaggggcaacga

SEQ ID NO: 1224 - RNA, 19 nt, Artificial Sequence
  Description of Artificial Sequence:  siNA sense region
aagaaaaaaaauaacacag

SEQ ID NO: 1225 - RNA, 19 nt, Artificial Sequence
  Description of Artificial Sequence:  siNA sense region
gagagacagacuugagaac

SEQ ID NO: 1226 - RNA, 19 nt, Artificial Sequence
  Description of Artificial Sequence:  siNA sense region
cuugacaaguugcgacgga

SEQ ID NO: 1227 - RNA, 19 nt, Artificial Sequence
  Description of Artificial Sequence:  siNA sense region
agagaaaaaagaagugucc

SEQ ID NO: 1228 - RNA, 19 nt, Artificial Sequence
  Description of Artificial Sequence:  siNA sense region
cgagaacuaaagccaaggg

SEQ ID NO: 1229 - RNA, 19 nt, Artificial Sequence
  Description of Artificial Sequence:  siNA sense region
guauccaaguuggacuggg

SEQ ID NO: 1230 - RNA, 19 nt, Artificial Sequence
  Description of Artificial Sequence:  siNA sense region
guucggucugacggcgccc

SEQ ID NO: 1231 - RNA, 19 nt, Artificial Sequence
  Description of Artificial Sequence:  siNA sense region
cccagugugcacgaguggg

SEQ ID NO: 1232 - RNA, 19 nt, Artificial Sequence
  Description of Artificial Sequence:  siNA sense region
gaaggacuuggucgcgccc

SEQ ID NO: 1233 - RNA, 19 nt, Artificial Sequence
  Description of Artificial Sequence:  siNA sense region
cucccuuggcguggagcca

SEQ ID NO: 1234 - RNA, 19 nt, Artificial Sequence
  Description of Artificial Sequence:  siNA sense region
agggagcggccgccugcgg

SEQ ID NO: 1235 - RNA, 19 nt, Artificial Sequence
  Description of Artificial Sequence:  siNA sense region
ggcugccccgcuuugcgga

SEQ ID NO: 1236 - RNA, 19 nt, Artificial Sequence
  Description of Artificial Sequence:  siNA sense region
acgggcuguccccgcgcga

SEQ ID NO: 1237 - RNA, 19 nt, Artificial Sequence
  Description of Artificial Sequence:  siNA sense region
aacggaacguuggacuuuc

SEQ ID NO: 1238 - RNA, 19 nt, Artificial Sequence
  Description of Artificial Sequence:  siNA sense region
cguuaacauugaccaagaa

SEQ ID NO: 1239 - RNA, 19 nt, Artificial Sequence
  Description of Artificial Sequence:  siNA sense region
acugcauggaccuaacauu

SEQ ID NO: 1240 - RNA, 19 nt, Artificial Sequence
  Description of Artificial Sequence:  siNA sense region
ucgaucucauucaguauua

SEQ ID NO: 1241 - RNA, 19 nt, Artificial Sequence
  Description of Artificial Sequence:  siNA sense region
aaaggggggagggggaggg

SEQ ID NO: 1242 - RNA, 19 nt, Artificial Sequence
  Description of Artificial Sequence:  siNA sense region
ggguuacaaacugcaauag

SEQ ID NO: 1243 - RNA, 19 nt, Artificial Sequence
  Description of Artificial Sequence:  siNA sense region
gagacuguagauugcuucu

SEQ ID NO: 1244 - RNA, 19 nt, Artificial Sequence
  Description of Artificial Sequence:  siNA sense region
uguaguacuccuuaagaac

SEQ ID NO: 1245 - RNA, 19 nt, Artificial Sequence
  Description of Artificial Sequence:  siNA sense region
cacaaagcggggggagggu

SEQ ID NO: 1246 - RNA, 19 nt, Artificial Sequence
  Description of Artificial Sequence:  siNA sense region
uuggggaggggcggcagga

SEQ ID NO: 1247 - RNA, 19 nt, Artificial Sequence
  Description of Artificial Sequence:  siNA sense region
agggagguuugugagagcg

SEQ ID NO: 1248 - RNA, 19 nt, Artificial Sequence
  Description of Artificial Sequence:  siNA sense region
gaggcugagccuacagaug

SEQ ID NO: 1249 - RNA, 19 nt, Artificial Sequence
  Description of Artificial Sequence:  siNA sense region
gaacucuuucuggccugcu

SEQ ID NO: 1250 - RNA, 19 nt, Artificial Sequence
  Description of Artificial Sequence:  siNA sense region
uuucguuaacuguguaugu

SEQ ID NO: 1251 - RNA, 19 nt, Artificial Sequence
  Description of Artificial Sequence:  siNA sense region
uacauauauauauuuuuua

SEQ ID NO: 1252 - RNA, 19 nt, Artificial Sequence
  Description of Artificial Sequence:  siNA sense region
aauuugauuaaagcugauu

SEQ ID NO: 1253 - RNA, 19 nt, Artificial Sequence
  Description of Artificial Sequence:  siNA sense region
uacugucaauaaacagcuu

SEQ ID NO: 1254 - RNA, 19 nt, Artificial Sequence
  Description of Artificial Sequence:  siNA sense region
ucaugccuuuguaaguuau

SEQ ID NO: 1255 - RNA, 19 nt, Artificial Sequence
  Description of Artificial Sequence:  siNA sense region
uuucuuguuuguuuguuug

SEQ ID NO: 1256 - RNA, 19 nt, Artificial Sequence
  Description of Artificial Sequence:  siNA sense region
ggguauccugcccaguguu

SEQ ID NO: 1257 - RNA, 19 nt, Artificial Sequence
  Description of Artificial Sequence:  siNA sense region
uguuuguaaauaagagauu

SEQ ID NO: 1258 - RNA, 19 nt, Artificial Sequence
  Description of Artificial Sequence:  siNA sense region
uuggagcacucugaguuua

SEQ ID NO: 1259 - RNA, 19 nt, Artificial Sequence
  Description of Artificial Sequence:  siNA sense region
accauuuguaauaaaguau

SEQ ID NO: 1260 - RNA, 19 nt, Artificial Sequence
  Description of Artificial Sequence:  siNA sense region
uauaauuuuuuuauguuuu

SEQ ID NO: 1261 - RNA, 19 nt, Artificial Sequence
  Description of Artificial Sequence:  siNA sense region
uguuucugaaaauuccaga

SEQ ID NO: 1262 - RNA, 19 nt, Artificial Sequence
  Description of Artificial Sequence:  siNA sense region
aaaggauauuuaagaaaau

SEQ ID NO: 1263 - RNA, 19 nt, Artificial Sequence
  Description of Artificial Sequence:  siNA sense region
uacaauaaacuauuggaaa

SEQ ID NO: 1264 - RNA, 19 nt, Artificial Sequence
  Description of Artificial Sequence:  siNA sense region
aguacuccccuaaccucuu

SEQ ID NO: 1265 - RNA, 19 nt, Artificial Sequence
  Description of Artificial Sequence:  siNA sense region
uuucugcaucaucuguaga

SEQ ID NO: 1266 - RNA, 19 nt, Artificial Sequence
  Description of Artificial Sequence:  siNA sense region
auccuagucuaucuaggug

SEQ ID NO: 1267 - RNA, 19 nt, Artificial Sequence
  Description of Artificial Sequence:  siNA sense region
ggaguugaaagaguuaaga

SEQ ID NO: 1268 - RNA, 19 nt, Artificial Sequence
  Description of Artificial Sequence:  siNA sense region
aaugcucgauaaaaucacu

SEQ ID NO: 1269 - RNA, 19 nt, Artificial Sequence
  Description of Artificial Sequence:  siNA sense region
ucucagugcuucuuacuau

SEQ ID NO: 1270 - RNA, 19 nt, Artificial Sequence
  Description of Artificial Sequence:  siNA sense region
uuaagcaguaaaaacuguu

SEQ ID NO: 1271 - RNA, 19 nt, Artificial Sequence
  Description of Artificial Sequence:  siNA sense region
ucucuauuagacuuagaaa

SEQ ID NO: 1272 - RNA, 19 nt, Artificial Sequence
  Description of Artificial Sequence:  siNA sense region
auaaauguaccugauguac

SEQ ID NO: 1273 - RNA, 19 nt, Artificial Sequence
  Description of Artificial Sequence:  siNA sense region
ccugaugcuaugucaggcu

SEQ ID NO: 1274 - RNA, 19 nt, Artificial Sequence
  Description of Artificial Sequence:  siNA sense region
uucauacuccacgcucccc

SEQ ID NO: 1275 - RNA, 19 nt, Artificial Sequence
  Description of Artificial Sequence:  siNA sense region
ccagcguaucuauauggaa

SEQ ID NO: 1276 - RNA, 19 nt, Artificial Sequence
  Description of Artificial Sequence:  siNA sense region
auugcuuaccaaaggcuag

SEQ ID NO: 1277 - RNA, 19 nt, Artificial Sequence
  Description of Artificial Sequence:  siNA sense region
gugcgauguuucaggaggc

SEQ ID NO: 1278 - RNA, 19 nt, Artificial Sequence
  Description of Artificial Sequence:  siNA sense region
cuggaggaagggggguugc

SEQ ID NO: 1279 - RNA, 19 nt, Artificial Sequence
  Description of Artificial Sequence:  siNA sense region
caguggagagggacagccc

SEQ ID NO: 1280 - RNA, 19 nt, Artificial Sequence
  Description of Artificial Sequence:  siNA sense region
cacugagaagucaaacauu

SEQ ID NO: 1281 - RNA, 19 nt, Artificial Sequence
  Description of Artificial Sequence:  siNA sense region
uucaaaguuuggauugcau

SEQ ID NO: 1282 - RNA, 19 nt, Artificial Sequence
  Description of Artificial Sequence:  siNA sense region
ucaaguggcaugugcugug

SEQ ID NO: 1283 - RNA, 19 nt, Artificial Sequence
  Description of Artificial Sequence:  siNA sense region
gaccauuuauaauguuaga

SEQ ID NO: 1284 - RNA, 19 nt, Artificial Sequence
  Description of Artificial Sequence:  siNA sense region
aaauuuuacaauaggugcu

SEQ ID NO: 1285 - RNA, 19 nt, Artificial Sequence
  Description of Artificial Sequence:  siNA sense region
uuauucucaaagcaggaau

SEQ ID NO: 1286 - RNA, 19 nt, Artificial Sequence
  Description of Artificial Sequence:  siNA sense region
uugguggcagauuuuacaa

SEQ ID NO: 1287 - RNA, 19 nt, Artificial Sequence
  Description of Artificial Sequence:  siNA sense region
aaagauguauccuuccaau

SEQ ID NO: 1288 - RNA, 19 nt, Artificial Sequence
  Description of Artificial Sequence:  siNA sense region
uuuggaaucuucucuuuga

SEQ ID NO: 1289 - RNA, 19 nt, Artificial Sequence
  Description of Artificial Sequence:  siNA sense region
acaauuccuagauaaaaag

SEQ ID NO: 1290 - RNA, 19 nt, Artificial Sequence
  Description of Artificial Sequence:  siNA sense region
gauggccuuugucuuauga

SEQ ID NO: 1291 - RNA, 19 nt, Artificial Sequence
  Description of Artificial Sequence:  siNA sense region
aauauuuauaacagcauuc

SEQ ID NO: 1292 - RNA, 19 nt, Artificial Sequence
  Description of Artificial Sequence:  siNA sense region
cugucacaauaaauguauu

SEQ ID NO: 1293 - RNA, 19 nt, Artificial Sequence
  Description of Artificial Sequence:  siNA sense region
uaaauguauucaaauacca

SEQ ID NO: 1294 - RNA, 19 nt, Artificial Sequence
  Description of Artificial Sequence:  siNA antisense region
agccacacucagugcaacu

SEQ ID NO: 1295 - RNA, 19 nt, Artificial Sequence
  Description of Artificial Sequence:  siNA antisense region
cucccgccucgcugcuuca

SEQ ID NO: 1296 - RNA, 19 nt, Artificial Sequence
  Description of Artificial Sequence:  siNA antisense region
ugacuccgcgcaccuccac

SEQ ID NO: 1297 - RNA, 19 nt, Artificial Sequence
  Description of Artificial Sequence:  siNA antisense region
ugugucugucugucugccu

SEQ ID NO: 1298 - RNA, 19 nt, Artificial Sequence
  Description of Artificial Sequence:  siNA antisense region
ccgaccuggcuggcuggcu

SEQ ID NO: 1299 - RNA, 19 nt, Artificial Sequence
  Description of Artificial Sequence:  siNA antisense region
gcaguucggacuauacugc

SEQ ID NO: 1300 - RNA, 19 nt, Artificial Sequence
  Description of Artificial Sequence:  siNA antisense region
gaaaagaaaauaagauuug

SEQ ID NO: 1301 - RNA, 19 nt, Artificial Sequence
  Description of Artificial Sequence:  siNA antisense region
ggcaguuagagagaaggug

SEQ ID NO: 1302 - RNA, 19 nt, Artificial Sequence
  Description of Artificial Sequence:  siNA antisense region
ccacaggcgcuagcucugg

SEQ ID NO: 1303 - RNA, 19 nt, Artificial Sequence
  Description of Artificial Sequence:  siNA antisense region
gaaccaccagcccgggagc

SEQ ID NO: 1304 - RNA, 19 nt, Artificial Sequence
  Description of Artificial Sequence:  siNA antisense region
ggcucucuggacacucccg

SEQ ID NO: 1305 - RNA, 19 nt, Artificial Sequence
  Description of Artificial Sequence:  siNA antisense region
ggggccggcuggagacaag

SEQ ID NO: 1306 - RNA, 19 nt, Artificial Sequence
  Description of Artificial Sequence:  siNA antisense region
cagcagggcucuccucccg

SEQ ID NO: 1307 - RNA, 19 nt, Artificial Sequence
  Description of Artificial Sequence:  siNA antisense region
cugucaacagcgccugggc

SEQ ID NO: 1308 - RNA, 19 nt, Artificial Sequence
  Description of Artificial Sequence:  siNA antisense region
uaccgcugcuuuccgccgc

SEQ ID NO: 1309 - RNA, 19 nt, Artificial Sequence
  Description of Artificial Sequence:  siNA antisense region
cccggcgggcgcguggggu

SEQ ID NO: 1310 - RNA, 19 nt, Artificial Sequence
  Description of Artificial Sequence:  siNA antisense region
agccgcucgccgacguccc

SEQ ID NO: 1311 - RNA, 19 nt, Artificial Sequence
  Description of Artificial Sequence:  siNA antisense region
aaaguucuuugcugcugca

SEQ ID NO: 1312 - RNA, 19 nt, Artificial Sequence
  Description of Artificial Sequence:  siNA antisense region
ccgguccuccccgccggga

SEQ ID NO: 1313 - RNA, 19 nt, Artificial Sequence
  Description of Artificial Sequence:  siNA antisense region
ggacucugccacuugucuc

SEQ ID NO: 1314 - RNA, 19 nt, Artificial Sequence
  Description of Artificial Sequence:  siNA antisense region
uugcaaaaguucgcuccgg

SEQ ID NO: 1315 - RNA, 19 nt, Artificial Sequence
  Description of Artificial Sequence:  siNA antisense region
cuaagacgcaggaaaggcu

SEQ ID NO: 1316 - RNA, 19 nt, Artificial Sequence
  Description of Artificial Sequence:  siNA antisense region
uuaccgccguggagaagcc

SEQ ID NO: 1317 - RNA, 19 nt, Artificial Sequence
  Description of Artificial Sequence:  siNA antisense region
uccgccgccuucuggucuu

SEQ ID NO: 1318 - RNA, 19 nt, Artificial Sequence
  Description of Artificial Sequence:  siNA antisense region
ucuucucuugcguggcucu

SEQ ID NO: 1319 - RNA, 19 nt, Artificial Sequence
  Description of Artificial Sequence:  siNA antisense region
aagcugagcgcacguccuu

SEQ ID NO: 1320 - RNA, 19 nt, Artificial Sequence
  Description of Artificial Sequence:  siNA antisense region
caacaaccggugcgagcga

SEQ ID NO: 1321 - RNA, 19 nt, Artificial Sequence
  Description of Artificial Sequence:  siNA antisense region
cucgcgcucgcccaaguuc

SEQ ID NO: 1322 - RNA, 19 nt, Artificial Sequence
  Description of Artificial Sequence:  siNA antisense region
ggcgcccggcagccgcggc

SEQ ID NO: 1323 - RNA, 19 nt, Artificial Sequence
  Description of Artificial Sequence:  siNA antisense region
ccgcugcuagggggagggg

SEQ ID NO: 1324 - RNA, 19 nt, Artificial Sequence
  Description of Artificial Sequence:  siNA antisense region
gacgacuuguccccuccuc

SEQ ID NO: 1325 - RNA, 19 nt, Artificial Sequence
  Description of Artificial Sequence:  siNA antisense region
cuuggccgcccggacuccg

SEQ ID NO: 1326 - RNA, 19 nt, Artificial Sequence
  Description of Artificial Sequence:  siNA antisense region
ggccggccggcggcggguc

SEQ ID NO: 1327 - RNA, 19 nt, Artificial Sequence
  Description of Artificial Sequence:  siNA antisense region
cagugcggacccugcagug

SEQ ID NO: 1328 - RNA, 19 nt, Artificial Sequence
  Description of Artificial Sequence:  siNA antisense region
ucuccccgcggagcggauc

SEQ ID NO: 1329 - RNA, 19 nt, Artificial Sequence
  Description of Artificial Sequence:  siNA antisense region
acuucccagagcagcggcu

SEQ ID NO: 1330 - RNA, 19 nt, Artificial Sequence
  Description of Artificial Sequence:  siNA antisense region
gaguccgcaggcgaacuca

SEQ ID NO: 1331 - RNA, 19 nt, Artificial Sequence
  Description of Artificial Sequence:  siNA antisense region
gggcgcagcgguuccucgg

SEQ ID NO: 1332 - RNA, 19 nt, Artificial Sequence
  Description of Artificial Sequence:  siNA antisense region
acucacugagcgcucuucg

SEQ ID NO: 1333 - RNA, 19 nt, Artificial Sequence
  Description of Artificial Sequence:  siNA antisense region
cuuugaaaagucgcgguca

SEQ ID NO: 1334 - RNA, 19 nt, Artificial Sequence
  Description of Artificial Sequence:  siNA antisense region
cucgcgcgcgcuacccggc

SEQ ID NO: 1335 - RNA, 19 nt, Artificial Sequence
  Description of Artificial Sequence:  siNA antisense region
cgcacucuuacuugucgac

SEQ ID NO: 1336 - RNA, 19 nt, Artificial Sequence
  Description of Artificial Sequence:  siNA antisense region
guuaauuaagaugccuccc

SEQ ID NO: 1337 - RNA, 19 nt, Artificial Sequence
  Description of Artificial Sequence:  siNA antisense region
cgcuccagggagcgcaggg

SEQ ID NO: 1338 - RNA, 19 nt, Artificial Sequence
  Description of Artificial Sequence:  siNA antisense region
gcgcccuccucaccagcuc

SEQ ID NO: 1339 - RNA, 19 nt, Artificial Sequence
  Description of Artificial Sequence:  siNA antisense region
cuggcugucguccccgcug

SEQ ID NO: 1340 - RNA, 19 nt, Artificial Sequence
  Description of Artificial Sequence:  siNA antisense region
uaagagcgcacgcacccgc

SEQ ID NO: 1341 - RNA, 19 nt, Artificial Sequence
  Description of Artificial Sequence:  siNA antisense region
ugacagggaaaguuucucu

SEQ ID NO: 1342 - RNA, 19 nt, Artificial Sequence
  Description of Artificial Sequence:  siNA antisense region
cgcgccccccggagccuuu

SEQ ID NO: 1343 - RNA, 19 nt, Artificial Sequence
  Description of Artificial Sequence:  siNA antisense region
uggcaagcgggggacaccc

SEQ ID NO: 1344 - RNA, 19 nt, Artificial Sequence
  Description of Artificial Sequence:  siNA antisense region
ggggccgcaacagggcucu

SEQ ID NO: 1345 - RNA, 19 nt, Artificial Sequence
  Description of Artificial Sequence:  siNA antisense region
cgugcgcgcacaaguuucg

SEQ ID NO: 1346 - RNA, 19 nt, Artificial Sequence
  Description of Artificial Sequence:  siNA antisense region
cacgugagguuaguuuggc

SEQ ID NO: 1347 - RNA, 19 nt, Artificial Sequence
  Description of Artificial Sequence:  siNA antisense region
uagaacaguccgucacuuc

SEQ ID NO: 1348 - RNA, 19 nt, Artificial Sequence
  Description of Artificial Sequence:  siNA antisense region
uuuccaucuuugcagucau

SEQ ID NO: 1349 - RNA, 19 nt, Artificial Sequence
  Description of Artificial Sequence:  siNA antisense region
caucgucauagaaggucgu

SEQ ID NO: 1350 - RNA, 19 nt, Artificial Sequence
  Description of Artificial Sequence:  siNA antisense region
ggaacgaggcguugagggc

SEQ ID NO: 1351 - RNA, 19 nt, Artificial Sequence
  Description of Artificial Sequence:  siNA antisense region
guccgcucucggacgggag

SEQ ID NO: 1352 - RNA, 19 nt, Artificial Sequence
  Description of Artificial Sequence:  siNA antisense region
gguuacuguagccauaagg

SEQ ID NO: 1353 - RNA, 19 nt, Artificial Sequence
  Description of Artificial Sequence:  siNA antisense region
ucuguuucaggaucuuggg

SEQ ID NO: 1354 - RNA, 19 nt, Artificial Sequence
  Description of Artificial Sequence:  siNA antisense region
ccagguucagggucaugcu

SEQ ID NO: 1355 - RNA, 19 nt, Artificial Sequence
  Description of Artificial Sequence:  siNA antisense region
ggcuccccacugggucggc

SEQ ID NO: 1356 - RNA, 19 nt, Artificial Sequence
  Description of Artificial Sequence:  siNA antisense region
cgcggaggugcggcuucag

SEQ ID NO: 1357 - RNA, 19 nt, Artificial Sequence
  Description of Artificial Sequence:  siNA antisense region
ggagguccgaguucuuggc

SEQ ID NO: 1358 - RNA, 19 nt, Artificial Sequence
  Description of Artificial Sequence:  siNA antisense region
ccacgucgggcgaggugag

SEQ ID NO: 1359 - RNA, 19 nt, Artificial Sequence
  Description of Artificial Sequence:  siNA antisense region
acgccagcuugagcagccc

SEQ ID NO: 1360 - RNA, 19 nt, Artificial Sequence
  Description of Artificial Sequence:  siNA antisense region
ggcgcuccagcucgggcga

SEQ ID NO: 1361 - RNA, 19 nt, Artificial Sequence
  Description of Artificial Sequence:  siNA antisense region
ugcuggacuggauuaucag

SEQ ID NO: 1362 - RNA, 19 nt, Artificial Sequence
  Description of Artificial Sequence:  siNA antisense region
ugguggugaugugcccguu

SEQ ID NO: 1363 - RNA, 19 nt, Artificial Sequence
  Description of Artificial Sequence:  siNA antisense region
acugggugggggucggcgu

SEQ ID NO: 1364 - RNA, 19 nt, Artificial Sequence
  Description of Artificial Sequence:  siNA antisense region
cguucuuggggcacaggaa

SEQ ID NO: 1365 - RNA, 19 nt, Artificial Sequence
  Description of Artificial Sequence:  siNA antisense region
ccuccugcucaucugucac

SEQ ID NO: 1366 - RNA, 19 nt, Artificial Sequence
  Description of Artificial Sequence:  siNA antisense region
cgaagcccucggcgaaccc

SEQ ID NO: 1367 - RNA, 19 nt, Artificial Sequence
  Description of Artificial Sequence:  siNA antisense region
guucggccagggcgcgcac

SEQ ID NO: 1368 - RNA, 19 nt, Artificial Sequence
  Description of Artificial Sequence:  siNA antisense region
gcguguucuggcugugcag

SEQ ID NO: 1369 - RNA, 19 nt, Artificial Sequence
  Description of Artificial Sequence:  siNA antisense region
ccgacgugacgcugggcag

SEQ ID NO: 1370 - RNA, 19 nt, Artificial Sequence
  Description of Artificial Sequence:  siNA antisense region
cguugaccggcugcgccgc

SEQ ID NO: 1371 - RNA, 19 nt, Artificial Sequence
  Description of Artificial Sequence:  siNA antisense region
gagccaccaugccugcccc

SEQ ID NO: 1372 - RNA, 19 nt, Artificial Sequence
  Description of Artificial Sequence:  siNA antisense region
ccaccgaggcuaccgcggg

SEQ ID NO: 1373 - RNA, 19 nt, Artificial Sequence
  Description of Artificial Sequence:  siNA antisense region
cgcugccgcugcccccugc

SEQ ID NO: 1374 - RNA, 19 nt, Artificial Sequence
  Description of Artificial Sequence:  siNA antisense region
ggcuggcgcugaagccgcc

SEQ ID NO: 1375 - RNA, 19 nt, Artificial Sequence
  Description of Artificial Sequence:  siNA antisense region
ccggcggcucgcugugcag

SEQ ID NO: 1376 - RNA, 19 nt, Artificial Sequence
  Description of Artificial Sequence:  siNA antisense region
ugcugagguuugcguagac

SEQ ID NO: 1377 - RNA, 19 nt, Artificial Sequence
  Description of Artificial Sequence:  siNA antisense region
gcgcgccuggguugaaguu

SEQ ID NO: 1378 - RNA, 19 nt, Artificial Sequence
  Description of Artificial Sequence:  siNA antisense region
ccccgccgccgcugcucag

SEQ ID NO: 1379 - RNA, 19 nt, Artificial Sequence
  Description of Artificial Sequence:  siNA antisense region
ccgcgccguaggagggcgc

SEQ ID NO: 1380 - RNA, 19 nt, Artificial Sequence
  Description of Artificial Sequence:  siNA antisense region
cgggaaaggccaggccggc

SEQ ID NO: 1381 - RNA, 19 nt, Artificial Sequence
  Description of Artificial Sequence:  siNA antisense region
gcugcugcugggguugcgc

SEQ ID NO: 1382 - RNA, 19 nt, Artificial Sequence
  Description of Artificial Sequence:  siNA antisense region
gguggugcggcggcugcug

SEQ ID NO: 1383 - RNA, 19 nt, Artificial Sequence
  Description of Artificial Sequence:  siNA antisense region
cgggcaucugcuggggcag

SEQ ID NO: 1384 - RNA, 19 nt, Artificial Sequence
  Description of Artificial Sequence:  siNA antisense region
gcagccgcgggugcugcac

SEQ ID NO: 1385 - RNA, 19 nt, Artificial Sequence
  Description of Artificial Sequence:  siNA antisense region
gcuccuccuucagggccug

SEQ ID NO: 1386 - RNA, 19 nt, Artificial Sequence
  Description of Artificial Sequence:  siNA antisense region
ucucgggcacugucugagg

SEQ ID NO: 1387 - RNA, 19 nt, Artificial Sequence
  Description of Artificial Sequence:  siNA antisense region
gcggugucucgccgggcau

SEQ ID NO: 1388 - RNA, 19 nt, Artificial Sequence
  Description of Artificial Sequence:  siNA antisense region
ugucgaugggggacagggg

SEQ ID NO: 1389 - RNA, 19 nt, Artificial Sequence
  Description of Artificial Sequence:  siNA antisense region
uccgcuccugggacuccau

SEQ ID NO: 1390 - RNA, 19 nt, Artificial Sequence
  Description of Artificial Sequence:  siNA antisense region
gcuuccucuccgccuugau

SEQ ID NO: 1391 - RNA, 19 nt, Artificial Sequence
  Description of Artificial Sequence:  siNA antisense region
cgaugcgguuccucaugcg

SEQ ID NO: 1392 - RNA, 19 nt, Artificial Sequence
  Description of Artificial Sequence:  siNA antisense region
uucggcacuuggaggcagc

SEQ ID NO: 1393 - RNA, 19 nt, Artificial Sequence
  Description of Artificial Sequence:  siNA antisense region
uucucuccagcuuccuuuu

SEQ ID NO: 1394 - RNA, 19 nt, Artificial Sequence
  Description of Artificial Sequence:  siNA antisense region
uuuccuccagccgggcgau

SEQ ID NO: 1395 - RNA, 19 nt, Artificial Sequence
  Description of Artificial Sequence:  siNA antisense region
cuuucaagguuuucacuuu

SEQ ID NO: 1396 - RNA, 19 nt, Artificial Sequence
  Description of Artificial Sequence:  siNA antisense region
ccagcuccgaguucugagc

SEQ ID NO: 1397 - RNA, 19 nt, Artificial Sequence
  Description of Artificial Sequence:  siNA antisense region
gcauguuggccguggacgc

SEQ ID NO: 1398 - RNA, 19 nt, Artificial Sequence
  Description of Artificial Sequence:  siNA antisense region
gugccaccuguucccugag

SEQ ID NO: 1399 - RNA, 19 nt, Artificial Sequence
  Description of Artificial Sequence:  siNA antisense region
ugacuuucuguuuaagcug

SEQ ID NO: 1400 - RNA, 19 nt, Artificial Sequence
  Description of Artificial Sequence:  siNA antisense region
cacuguuaacgugguucau

SEQ ID NO: 1401 - RNA, 19 nt, Artificial Sequence
  Description of Artificial Sequence:  siNA antisense region
uuagcaugaguuggcaccc

SEQ ID NO: 1402 - RNA, 19 nt, Artificial Sequence
  Description of Artificial Sequence:  siNA antisense region
auguuugcaacugcugcgu

SEQ ID NO: 1403 - RNA, 19 nt, Artificial Sequence
  Description of Artificial Sequence:  siNA antisense region
cgacggucucucuucaaaa

SEQ ID NO: 1404 - RNA, 19 nt, Artificial Sequence
  Description of Artificial Sequence:  siNA antisense region
ucguugccccucagccccc

SEQ ID NO: 1405 - RNA, 19 nt, Artificial Sequence
  Description of Artificial Sequence:  siNA antisense region
cuguguuauuuuuuuucuu

SEQ ID NO: 1406 - RNA, 19 nt, Artificial Sequence
  Description of Artificial Sequence:  siNA antisense region
guucucaagucugucucuc

SEQ ID NO: 1407 - RNA, 19 nt, Artificial Sequence
  Description of Artificial Sequence:  siNA antisense region
uccgucgcaacuugucaag

SEQ ID NO: 1408 - RNA, 19 nt, Artificial Sequence
  Description of Artificial Sequence:  siNA antisense region
ggacacuucuuuuuucucu

SEQ ID NO: 1409 - RNA, 19 nt, Artificial Sequence
  Description of Artificial Sequence:  siNA antisense region
cccuuggcuuuaguucucg

SEQ ID NO: 1410 - RNA, 19 nt, Artificial Sequence
  Description of Artificial Sequence:  siNA antisense region
cccaguccaacuuggauac

SEQ ID NO: 1411 - RNA, 19 nt, Artificial Sequence
  Description of Artificial Sequence:  siNA antisense region
gggcgccgucagaccgaac

SEQ ID NO: 1412 - RNA, 19 nt, Artificial Sequence
  Description of Artificial Sequence:  siNA antisense region
cccacucgugcacacuggg

SEQ ID NO: 1413 - RNA, 19 nt, Artificial Sequence
  Description of Artificial Sequence:  siNA antisense region
gggcgcgaccaaguccuuc

SEQ ID NO: 1414 - RNA, 19 nt, Artificial Sequence
  Description of Artificial Sequence:  siNA antisense region
uggcuccacgccaagggag

SEQ ID NO: 1415 - RNA, 19 nt, Artificial Sequence
  Description of Artificial Sequence:  siNA antisense region
ccgcaggcggccgcucccu

SEQ ID NO: 1416 - RNA, 19 nt, Artificial Sequence
  Description of Artificial Sequence:  siNA antisense region
uccgcaaagcggggcagcc

SEQ ID NO: 1417 - RNA, 19 nt, Artificial Sequence
  Description of Artificial Sequence:  siNA antisense region
ucgcgcggggacagcccgu

SEQ ID NO: 1418 - RNA, 19 nt, Artificial Sequence
  Description of Artificial Sequence:  siNA antisense region
gaaaguccaacguuccguu

SEQ ID NO: 1419 - RNA, 19 nt, Artificial Sequence
  Description of Artificial Sequence:  siNA antisense region
uucuuggucaauguuaacg

SEQ ID NO: 1420 - RNA, 19 nt, Artificial Sequence
  Description of Artificial Sequence:  siNA antisense region
aauguuagguccaugcagu

SEQ ID NO: 1421 - RNA, 19 nt, Artificial Sequence
  Description of Artificial Sequence:  siNA antisense region
uaauacugaaugagaucga

SEQ ID NO: 1422 - RNA, 19 nt, Artificial Sequence
  Description of Artificial Sequence:  siNA antisense region
cccucccccuccccccuuu

SEQ ID NO: 1423 - RNA, 19 nt, Artificial Sequence
  Description of Artificial Sequence:  siNA antisense region
cuauugcaguuuguaaccc

SEQ ID NO: 1424 - RNA, 19 nt, Artificial Sequence
  Description of Artificial Sequence:  siNA antisense region
agaagcaaucuacagucuc

SEQ ID NO: 1425 - RNA, 19 nt, Artificial Sequence
  Description of Artificial Sequence:  siNA antisense region
guucuuaaggaguacuaca

SEQ ID NO: 1426 - RNA, 19 nt, Artificial Sequence
  Description of Artificial Sequence:  siNA antisense region
acccuccccccgcuuugug

SEQ ID NO: 1427 - RNA, 19 nt, Artificial Sequence
  Description of Artificial Sequence:  siNA antisense region
uccugccgccccuccccaa

SEQ ID NO: 1428 - RNA, 19 nt, Artificial Sequence
  Description of Artificial Sequence:  siNA antisense region
cgcucucacaaaccucccu

SEQ ID NO: 1429 - RNA, 19 nt, Artificial Sequence
  Description of Artificial Sequence:  siNA antisense region
caucuguaggcucagccuc

SEQ ID NO: 1430 - RNA, 19 nt, Artificial Sequence
  Description of Artificial Sequence:  siNA antisense region
agcaggccagaaagaguuc

SEQ ID NO: 1431 - RNA, 19 nt, Artificial Sequence
  Description of Artificial Sequence:  siNA antisense region
acauacacaguuaacgaaa

SEQ ID NO: 1432 - RNA, 19 nt, Artificial Sequence
  Description of Artificial Sequence:  siNA antisense region
uaaaaaauauauauaugua

SEQ ID NO: 1433 - RNA, 19 nt, Artificial Sequence
  Description of Artificial Sequence:  siNA antisense region
aaucagcuuuaaucaaauu

SEQ ID NO: 1434 - RNA, 19 nt, Artificial Sequence
  Description of Artificial Sequence:  siNA antisense region
aagcuguuuauugacagua

SEQ ID NO: 1435 - RNA, 19 nt, Artificial Sequence
  Description of Artificial Sequence:  siNA antisense region
auaacuuacaaaggcauga

SEQ ID NO: 1436 - RNA, 19 nt, Artificial Sequence
  Description of Artificial Sequence:  siNA antisense region
caaacaaacaaacaagaaa

SEQ ID NO: 1437 - RNA, 19 nt, Artificial Sequence
  Description of Artificial Sequence:  siNA antisense region
aacacugggcaggauaccc

SEQ ID NO: 1438 - RNA, 19 nt, Artificial Sequence
  Description of Artificial Sequence:  siNA antisense region
aaucucuuauuuacaaaca

SEQ ID NO: 1439 - RNA, 19 nt, Artificial Sequence
  Description of Artificial Sequence:  siNA antisense region
uaaacucagagugcuccaa

SEQ ID NO: 1440 - RNA, 19 nt, Artificial Sequence
  Description of Artificial Sequence:  siNA antisense region
auacuuuauuacaaauggu

SEQ ID NO: 1441 - RNA, 19 nt, Artificial Sequence
  Description of Artificial Sequence:  siNA antisense region
aaaacauaaaaaaauuaua

SEQ ID NO: 1442 - RNA, 19 nt, Artificial Sequence
  Description of Artificial Sequence:  siNA antisense region
ucuggaauuuucagaaaca

SEQ ID NO: 1443 - RNA, 19 nt, Artificial Sequence
  Description of Artificial Sequence:  siNA antisense region
auuuucuuaaauauccuuu

SEQ ID NO: 1444 - RNA, 19 nt, Artificial Sequence
  Description of Artificial Sequence:  siNA antisense region
uuuccaauaguuuauugua

SEQ ID NO: 1445 - RNA, 19 nt, Artificial Sequence
  Description of Artificial Sequence:  siNA antisense region
aagagguuaggggaguacu

SEQ ID NO: 1446 - RNA, 19 nt, Artificial Sequence
  Description of Artificial Sequence:  siNA antisense region
ucuacagaugaugcagaaa

SEQ ID NO: 1447 - RNA, 19 nt, Artificial Sequence
  Description of Artificial Sequence:  siNA antisense region
caccuagauagacuaggau

SEQ ID NO: 1448 - RNA, 19 nt, Artificial Sequence
  Description of Artificial Sequence:  siNA antisense region
ucuuaacucuuucaacucc

SEQ ID NO: 1449 - RNA, 19 nt, Artificial Sequence
  Description of Artificial Sequence:  siNA antisense region
agugauuuuaucgagcauu

SEQ ID NO: 1450 - RNA, 19 nt, Artificial Sequence
  Description of Artificial Sequence:  siNA antisense region
auaguaagaagcacugaga

SEQ ID NO: 1451 - RNA, 19 nt, Artificial Sequence
  Description of Artificial Sequence:  siNA antisense region
aacaguuuuuacugcuuaa

SEQ ID NO: 1452 - RNA, 19 nt, Artificial Sequence
  Description of Artificial Sequence:  siNA antisense region
uuucuaagucuaauagaga

SEQ ID NO: 1453 - RNA, 19 nt, Artificial Sequence
  Description of Artificial Sequence:  siNA antisense region
guacaucagguacauuuau

SEQ ID NO: 1454 - RNA, 19 nt, Artificial Sequence
  Description of Artificial Sequence:  siNA antisense region
agccugacauagcaucagg

SEQ ID NO: 1455 - RNA, 19 nt, Artificial Sequence
  Description of Artificial Sequence:  siNA antisense region
ggggagcguggaguaugaa

SEQ ID NO: 1456 - RNA, 19 nt, Artificial Sequence
  Description of Artificial Sequence:  siNA antisense region
uuccauauagauacgcugg

SEQ ID NO: 1457 - RNA, 19 nt, Artificial Sequence
  Description of Artificial Sequence:  siNA antisense region
cuagccuuugguaagcaau

SEQ ID NO: 1458 - RNA, 19 nt, Artificial Sequence
  Description of Artificial Sequence:  siNA antisense region
gccuccugaaacaucgcac

SEQ ID NO: 1459 - RNA, 19 nt, Artificial Sequence
  Description of Artificial Sequence:  siNA antisense region
gcaaccccccuuccuccag

SEQ ID NO: 1460 - RNA, 19 nt, Artificial Sequence
  Description of Artificial Sequence:  siNA antisense region
gggcugucccucuccacug

SEQ ID NO: 1461 - RNA, 19 nt, Artificial Sequence
  Description of Artificial Sequence:  siNA antisense region
aauguuugacuucucagug

SEQ ID NO: 1462 - RNA, 19 nt, Artificial Sequence
  Description of Artificial Sequence:  siNA antisense region
augcaauccaaacuuugaa

SEQ ID NO: 1463 - RNA, 19 nt, Artificial Sequence
  Description of Artificial Sequence:  siNA antisense region
cacagcacaugccacuuga

SEQ ID NO: 1464 - RNA, 19 nt, Artificial Sequence
  Description of Artificial Sequence:  siNA antisense region
ucuaacauuauaaaugguc

SEQ ID NO: 1465 - RNA, 19 nt, Artificial Sequence
  Description of Artificial Sequence:  siNA antisense region
agcaccuauuguaaaauuu

SEQ ID NO: 1466 - RNA, 19 nt, Artificial Sequence
  Description of Artificial Sequence:  siNA antisense region
auuccugcuuugagaauaa

SEQ ID NO: 1467 - RNA, 19 nt, Artificial Sequence
  Description of Artificial Sequence:  siNA antisense region
uuguaaaaucugccaccaa

SEQ ID NO: 1468 - RNA, 19 nt, Artificial Sequence
  Description of Artificial Sequence:  siNA antisense region
auuggaaggauacaucuuu

SEQ ID NO: 1469 - RNA, 19 nt, Artificial Sequence
  Description of Artificial Sequence:  siNA antisense region
ucaaagagaagauuccaaa

SEQ ID NO: 1470 - RNA, 19 nt, Artificial Sequence
  Description of Artificial Sequence:  siNA antisense region
cuuuuuaucuaggaauugu

SEQ ID NO: 1471 - RNA, 19 nt, Artificial Sequence
  Description of Artificial Sequence:  siNA antisense region
ucauaagacaaaggccauc

SEQ ID NO: 1472 - RNA, 19 nt, Artificial Sequence
  Description of Artificial Sequence:  siNA antisense region
gaaugcuguuauaaauauu

SEQ ID NO: 1473 - RNA, 19 nt, Artificial Sequence
  Description of Artificial Sequence:  siNA antisense region
aauacauuuauugugacag

SEQ ID NO: 1474 - RNA, 19 nt, Artificial Sequence
  Description of Artificial Sequence:  siNA antisense region
ugguauuugaauacauuua

SEQ ID NO: 1475 - RNA, 23 nt, Artificial Sequence
  Description of Artificial Sequence:  siNA sense region
accagaccuacugccagagaacc

SEQ ID NO: 1476 - RNA, 23 nt, Artificial Sequence
  Description of Artificial Sequence:  siNA sense region
uugaagacacaacaccucagcaa

SEQ ID NO: 1477 - RNA, 23 nt, Artificial Sequence
  Description of Artificial Sequence:  siNA sense region
aucacacaggguuccugacagaa

SEQ ID NO: 1478 - RNA, 23 nt, Artificial Sequence
  Description of Artificial Sequence:  siNA sense region
uuggcucuagucacuggcaucuc

SEQ ID NO: 1479 - RNA, 23 nt, Artificial Sequence
  Description of Artificial Sequence:  siNA sense region
auuggcccagcuuuuagaaaaug

SEQ ID NO: 1480 - RNA, 23 nt, Artificial Sequence
  Description of Artificial Sequence:  siNA sense region
acuguggaguugacucgguguuc

SEQ ID NO: 1481 - RNA, 23 nt, Artificial Sequence
  Description of Artificial Sequence:  siNA sense region
uguggugagaaauuugccuuguu

SEQ ID NO: 1482 - RNA, 23 nt, Artificial Sequence
  Description of Artificial Sequence:  siNA sense region
ccucgcaugacuguuacagcuuu

SEQ ID NO: 1483 - RNA, 23 nt, Artificial Sequence
  Description of Artificial Sequence:  siNA sense region
ccuucgaacaucagaccuacugc

SEQ ID NO: 1484 - RNA, 23 nt, Artificial Sequence
  Description of Artificial Sequence:  siNA sense region
ugaacuccaagggcuauaccaag

SEQ ID NO: 1485 - RNA, 23 nt, Artificial Sequence
  Description of Artificial Sequence:  siNA sense region
caagggcuauaccaaguccaucg

SEQ ID NO: 1486 - RNA, 23 nt, Artificial Sequence
  Description of Artificial Sequence:  siNA sense region
agggcuauaccaaguccaucgac

SEQ ID NO: 1487 - RNA, 23 nt, Artificial Sequence
  Description of Artificial Sequence:  siNA sense region
accuggagcaguacuaugacccg

SEQ ID NO: 1488 - RNA, 23 nt, Artificial Sequence
  Description of Artificial Sequence:  siNA sense region
cucccgccagacuguuagaaaau

SEQ ID NO: 1489 - RNA, 23 nt, Artificial Sequence
  Description of Artificial Sequence:  siNA sense region
uucuguguguggugagcagaagu

SEQ ID NO: 1490 - RNA, 23 nt, Artificial Sequence
  Description of Artificial Sequence:  siNA sense region
guguguggugagcagaaguggag

SEQ ID NO: 1491 - RNA, 23 nt, Artificial Sequence
  Description of Artificial Sequence:  siNA sense region
gaagcaagcgugacaacaauuuu

SEQ ID NO: 1492 - RNA, 23 nt, Artificial Sequence
  Description of Artificial Sequence:  siNA sense region
aacagcuuggaacaccauguccu

SEQ ID NO: 1493 - RNA, 23 nt, Artificial Sequence
  Description of Artificial Sequence:  siNA sense region
cuuuucccagcugacucagaaca

SEQ ID NO: 1494 - RNA, 23 nt, Artificial Sequence
  Description of Artificial Sequence:  siNA sense region
uuuucccagcugacucagaacac

SEQ ID NO: 1495 - RNA, 23 nt, Artificial Sequence
  Description of Artificial Sequence:  siNA sense region
caaacuuaaagccagucaggcaa

SEQ ID NO: 1496 - RNA, 23 nt, Artificial Sequence
  Description of Artificial Sequence:  siNA sense region
aggcaagggauuuguuauccaaa

SEQ ID NO: 1497 - RNA, 23 nt, Artificial Sequence
  Description of Artificial Sequence:  siNA sense region
caaugucaacagauccgacuuug

SEQ ID NO: 1498 - RNA, 23 nt, Artificial Sequence
  Description of Artificial Sequence:  siNA sense region
cuuuggccucugauacagacagc

SEQ ID NO: 1499 - RNA, 23 nt, Artificial Sequence
  Description of Artificial Sequence:  siNA sense region
gccuacuuugcucaguaccacga

SEQ ID NO: 1500 - RNA, 23 nt, Artificial Sequence
  Description of Artificial Sequence:  siNA sense region
ugucugucuuugugggaggguaa

SEQ ID NO: 1501 - RNA, 23 nt, Artificial Sequence
  Description of Artificial Sequence:  siNA sense region
accaacuggcuucugugcacuag

SEQ ID NO: 1502 - RNA, 23 nt, Artificial Sequence
  Description of Artificial Sequence:  siNA sense region
agcagagugaggauguguuuugc

SEQ ID NO: 1503 - RNA, 23 nt, Artificial Sequence
  Description of Artificial Sequence:  siNA sense region
aucccaugucaccucagcugaua

SEQ ID NO: 1504 - RNA, 23 nt, Artificial Sequence
  Description of Artificial Sequence:  siNA sense region
aaaagggucuucuuggcagcuua

SEQ ID NO: 1505 - RNA, 23 nt, Artificial Sequence
  Description of Artificial Sequence:  siNA sense region
ggacucuaagcuggagcucuugg

SEQ ID NO: 1506 - RNA, 23 nt, Artificial Sequence
  Description of Artificial Sequence:  siNA sense region
uuggcuguaaucaguuaugccgu

SEQ ID NO: 1507 - RNA, 23 nt, Artificial Sequence
  Description of Artificial Sequence:  siNA sense region
agugaccgcgacuuuucaaagcc

SEQ ID NO: 1508 - RNA, 23 nt, Artificial Sequence
  Description of Artificial Sequence:  siNA sense region
caaaccucagcaacuucaaccca

SEQ ID NO: 1509 - RNA, 23 nt, Artificial Sequence
  Description of Artificial Sequence:  siNA sense region
aaaccucagcaacuucaacccag

SEQ ID NO: 1510 - RNA, 23 nt, Artificial Sequence
  Description of Artificial Sequence:  siNA sense region
aggaaaaagugaaaaccuugaaa

SEQ ID NO: 1511 - RNA, 23 nt, Artificial Sequence
  Description of Artificial Sequence:  siNA sense region
ggaaaaagugaaaaccuugaaag

SEQ ID NO: 1512 - RNA, 23 nt, Artificial Sequence
  Description of Artificial Sequence:  siNA sense region
cucagggaacagguggcacagcu

SEQ ID NO: 1513 - RNA, 23 nt, Artificial Sequence
  Description of Artificial Sequence:  siNA sense region
acagaaagucaugaaccacguua

SEQ ID NO: 1514 - RNA, 23 nt, Artificial Sequence
  Description of Artificial Sequence:  siNA sense region
cagaaagucaugaaccacguuaa

SEQ ID NO: 1515 - RNA, 23 nt, Artificial Sequence
  Description of Artificial Sequence:  siNA sense region
gaaagucaugaaccacguuaaca

SEQ ID NO: 1516 - RNA, 23 nt, Artificial Sequence
  Description of Artificial Sequence:  siNA sense region
agucaugaaccacguuaacagug

SEQ ID NO: 1517 - RNA, 23 nt, Artificial Sequence
  Description of Artificial Sequence:  siNA sense region
acagugggugccaacucaugcua

SEQ ID NO: 1518 - RNA, 23 nt, Artificial Sequence
  Description of Artificial Sequence:  siNA sense region
ggugccaacucaugcuaacgcag

SEQ ID NO: 1519 - RNA, 23 nt, Artificial Sequence
  Description of Artificial Sequence:  siNA sense region
gugccaacucaugcuaacgcagc

SEQ ID NO: 1520 - RNA, 23 nt, Artificial Sequence
  Description of Artificial Sequence:  siNA sense region
gccaacucaugcuaacgcagcag

SEQ ID NO: 1521 - RNA, 23 nt, Artificial Sequence
  Description of Artificial Sequence:  siNA sense region
ccaacucaugcuaacgcagcagu

SEQ ID NO: 1522 - RNA, 23 nt, Artificial Sequence
  Description of Artificial Sequence:  siNA sense region
caacucaugcuaacgcagcaguu

SEQ ID NO: 1523 - RNA, 23 nt, Artificial Sequence
  Description of Artificial Sequence:  siNA sense region
aacauugaccaagaacugcaugg

SEQ ID NO: 1524 - RNA, 23 nt, Artificial Sequence
  Description of Artificial Sequence:  siNA sense region
acauugaccaagaacugcaugga

SEQ ID NO: 1525 - RNA, 23 nt, Artificial Sequence
  Description of Artificial Sequence:  siNA sense region
cauugaccaagaacugcauggac

SEQ ID NO: 1526 - RNA, 23 nt, Artificial Sequence
  Description of Artificial Sequence:  siNA sense region
auugaccaagaacugcauggacc

SEQ ID NO: 1527 - RNA, 23 nt, Artificial Sequence
  Description of Artificial Sequence:  siNA sense region
ugaccaagaacugcauggaccua

SEQ ID NO: 1528 - RNA, 23 nt, Artificial Sequence
  Description of Artificial Sequence:  siNA sense region
accaagaacugcauggaccuaac

SEQ ID NO: 1529 - RNA, 23 nt, Artificial Sequence
  Description of Artificial Sequence:  siNA sense region
caagaacugcauggaccuaacau

SEQ ID NO: 1530 - RNA, 23 nt, Artificial Sequence
  Description of Artificial Sequence:  siNA sense region
agaacugcauggaccuaacauuc

SEQ ID NO: 1531 - RNA, 23 nt, Artificial Sequence
  Description of Artificial Sequence:  siNA sense region
gaacugcauggaccuaacauucg

SEQ ID NO: 1532 - RNA, 23 nt, Artificial Sequence
  Description of Artificial Sequence:  siNA sense region
aacugcauggaccuaacauucga

SEQ ID NO: 1533 - RNA, 23 nt, Artificial Sequence
  Description of Artificial Sequence:  siNA sense region
cugcauggaccuaacauucgauc

SEQ ID NO: 1534 - RNA, 23 nt, Artificial Sequence
  Description of Artificial Sequence:  siNA sense region
gcauggaccuaacauucgaucuc

SEQ ID NO: 1535 - RNA, 21 nt, Artificial Sequence
  Description of Artificial Sequence:  siNA sense region
  misc_feature (20)..(21): n is thymidine
cagaccuacugccagagaann

SEQ ID NO: 1536 - RNA, 21 nt, Artificial Sequence
  Description of Artificial Sequence:  siNA sense region
  misc_feature (20)..(21): n is thymidine
gaagacacaacaccucagcnn

SEQ ID NO: 1537 - RNA, 21 nt, Artificial Sequence
  Description of Artificial Sequence:  siNA sense region
  misc_feature (20)..(21): n is thymidine
cacacaggguuccugacagnn

SEQ ID NO: 1538 - RNA, 21 nt, Artificial Sequence
  Description of Artificial Sequence:  siNA sense region
  misc_feature (20)..(21): n is thymidine
ggcucuagucacuggcaucnn

SEQ ID NO: 1539 - RNA, 21 nt, Artificial Sequence
  Description of Artificial Sequence:  siNA sense region
  misc_feature (20)..(21): n is thymidine
uggcccagcuuuuagaaaann

SEQ ID NO: 1540 - RNA, 21 nt, Artificial Sequence
  Description of Artificial Sequence:  siNA sense region
  misc_feature (20)..(21): n is thymidine
uguggaguugacucggugunn

SEQ ID NO: 1541 - RNA, 21 nt, Artificial Sequence
  Description of Artificial Sequence:  siNA sense region
  misc_feature (20)..(21): n is thymidine
uggugagaaauuugccuugnn

SEQ ID NO: 1542 - RNA, 21 nt, Artificial Sequence
  Description of Artificial Sequence:  siNA sense region
  misc_feature (20)..(21): n is thymidine
ucgcaugacuguuacagcunn

SEQ ID NO: 1543 - RNA, 21 nt, Artificial Sequence
  Description of Artificial Sequence:  siNA sense region
  misc_feature (20)..(21): n is thymidine
uucucuggcaguaggucugnn

SEQ ID NO: 1544 - RNA, 21 nt, Artificial Sequence
  Description of Artificial Sequence:  siNA sense region
  misc_feature (20)..(21): n is thymidine
gcugagguguugugucuucnn

SEQ ID NO: 1545 - RNA, 21 nt, Artificial Sequence
  Description of Artificial Sequence:  siNA sense region
  misc_feature (20)..(21): n is thymidine
cugucaggaacccugugugnn

SEQ ID NO: 1546 - RNA, 21 nt, Artificial Sequence
  Description of Artificial Sequence:  siNA sense region
  misc_feature (20)..(21): n is thymidine
gaugccagugacuagagccnn

SEQ ID NO: 1547 - RNA, 21 nt, Artificial Sequence
  Description of Artificial Sequence:  siNA sense region
  misc_feature (20)..(21): n is thymidine
uuuucuaaaagcugggccann

SEQ ID NO: 1548 - RNA, 21 nt, Artificial Sequence
  Description of Artificial Sequence:  siNA sense region
  misc_feature (20)..(21): n is thymidine
acaccgagucaacuccacann

SEQ ID NO: 1549 - RNA, 21 nt, Artificial Sequence
  Description of Artificial Sequence:  siNA sense region
  misc_feature (20)..(21): n is thymidine
caaggcaaauuucucaccann

SEQ ID NO: 1550 - RNA, 21 nt, Artificial Sequence
  Description of Artificial Sequence:  siNA sense region
  misc_feature (20)..(21): n is thymidine
agcuguaacagucaugcgann

SEQ ID NO: 1551 - RNA, 21 nt, Artificial Sequence
  Description of Artificial Sequence:  siNA sense region
  misc_feature (1)..(1): 5'-3 attached terminal deoxyabasic moiety
  misc_feature (1)..(1): 2'-deoxy-2'-Fluoro
  misc_feature (5)..(7): 2'-deoxy-2'-Fluoro
  misc_feature (9)..(10): 2'-deoxy-2'-Fluoro
  misc_feature (12)..(13): 2'-deoxy-2'-Fluoro
  misc_feature (20)..(20): n is thymidine
  misc_feature (21)..(21): 3'-3 attached terminal deoxyabasic moiety
cagaccuacugccagagaann

SEQ ID NO: 1552 - RNA, 21 nt, Artificial Sequence
  Description of Artificial Sequence:  siNA sense region
  misc_feature (1)..(1): 5'-3 attached terminal deoxyabasic moeity
  misc_feature (6)..(6): 2'-deoxy-2'-Fluoro
  misc_feature (8)..(8): 2'-deoxy-2'-Fluoro
  misc_feature (11)..(11): 2'-deoxy-2'-Fluoro
  misc_feature (13)..(16): 2'-deoxy-2'-Fluoro
  misc_feature (19)..(19): 2'-deoxy-2'-Fluoro
  misc_feature (20)..(20): n is thymidine
  misc_feature (21)..(21): 3'-3 attached terminal deoxyabasic moeity
gaagacacaacaccucagcnn

SEQ ID NO: 1553 - RNA, 21 nt, Artificial Sequence
  Description of Artificial Sequence:  siNA sense region
  misc_feature (1)..(1): 5'-3 attached terminal deoxyabasic moeity
  misc_feature (1)..(1): 2'-deoxy-2'-Fluoro
  misc_feature (3)..(3): 2'-deoxy-2'-Fluoro
  misc_feature (5)..(5): 2'-deoxy-2'-Fluoro
  misc_feature (10)..(14): 2'-deoxy-2'-Fluoro
  misc_feature (17)..(17): 2'-deoxy-2'-Fluoro
  misc_feature (20)..(20): n is thymidine
  misc_feature (21)..(21): 3'-3 attached terminal deoxyabasic moeity
cacacaggguuccugacagnn

SEQ ID NO: 1554 - RNA, 21 nt, Artificial Sequence
  Description of Artificial Sequence:  siNA sense region
  misc_feature (1)..(1): 5'-3 attached terminal deoxyabasic moeity
  misc_feature (3)..(6): 2'-deoxy-2'-Fluoro
  misc_feature (9)..(10): 2'-deoxy-2'-Fluoro
  misc_feature (12)..(13): 2'-deoxy-2'-Fluoro
  misc_feature (16)..(16): 2'-deoxy-2'-Fluoro
  misc_feature (18)..(19): 2'-deoxy-2'-Fluoro
  misc_feature (20)..(20): n is thymidine
  misc_feature (21)..(21): 3'-3 attached terminal deoxyabasic moeity
ggcucuagucacuggcaucnn

SEQ ID NO: 1555 - RNA, 21 nt, Artificial Sequence
  Description of Artificial Sequence:  siNA sense region
  misc_feature (1)..(1): 2'-deoxy-2'-Fluoro
  misc_feature (1)..(1): 5'-3 attached terminal deoxyabasic moeity
  misc_feature (4)..(6): 2'-deoxy-2'-Fluoro
  misc_feature (9)..(13): 2'-deoxy-2'-Fluoro
  misc_feature (20)..(20): n is thymidine
  misc_feature (21)..(21): 3'-3 attached terminal deoxyabasic moeity
uggcccagcuuuuagaaaann

SEQ ID NO: 1556 - RNA, 21 nt, Artificial Sequence
  Description of Artificial Sequence:  siNA sense region
  misc_feature (1)..(1): 5'-3 attached terminal deoxyabasic moeity
  misc_feature (1)..(1): 2'-deoxy-2'-Fluoro
  misc_feature (3)..(3): 2'-deoxy-2'-Fluoro
  misc_feature (8)..(9): 2'-deoxy-2'-Fluoro
  misc_feature (12)..(14): 2'-deoxy-2'-Fluoro
  misc_feature (17)..(17): 2'-deoxy-2'-Fluoro
  misc_feature (19)..(19): 2'-deoxy-2'-Fluoro
  misc_feature (20)..(20): n is thymidine
  misc_feature (21)..(21): 3'-3 attached terminal deoxyabasic moeity
uguggaguugacucggugunn

SEQ ID NO: 1557 - RNA, 21 nt, Artificial Sequence
  Description of Artificial Sequence:  siNA sense region
  misc_feature (1)..(1): 2'-deoxy-2'-Fluoro
  misc_feature (1)..(1): 5'-3 attached terminal deoxyabasic moeity
  misc_feature (4)..(4): 2'-deoxy-2'-Fluoro
  misc_feature (11)..(13): 2'-deoxy-2'-Fluoro
  misc_feature (15)..(18): 2'-deoxy-2'-Fluoro
  misc_feature (20)..(20): n is thymidine
  misc_feature (21)..(21): 3'-3 attached terminal deoxyabasic moeity
uggugagaaauuugccuugnn

SEQ ID NO: 1558 - RNA, 21 nt, Artificial Sequence
  Description of Artificial Sequence:  siNA sense region
  misc_feature (1)..(1): 5'-3 attached terminal deoxyabasic moeity
  misc_feature (1)..(2): 2'-deoxy-2'-Fluoro
  misc_feature (4)..(4): 2'-deoxy-2'-Fluoro
  misc_feature (6)..(6): 2'-deoxy-2'-Fluoro
  misc_feature (9)..(10): 2'-deoxy-2'-Fluoro
  misc_feature (12)..(13): 2'-deoxy-2'-Fluoro
  misc_feature (15)..(15): 2'-deoxy-2'-Fluoro
  misc_feature (18)..(19): 2'-deoxy-2'-Fluoro
  misc_feature (20)..(20): n is thymidine
  misc_feature (21)..(21): 3'-3 attached terminal deoxyabasic moeity
ucgcaugacuguuacagcunn

SEQ ID NO: 1559 - RNA, 21 nt, Artificial Sequence
  Description of Artificial Sequence:  siNA sense region
  misc_feature (1)..(6): 2'-deoxy-2'-Fluoro
  misc_feature (9)..(9): 2'-deoxy-2'-Fluoro
  misc_feature (12)..(12): 2'-deoxy-2'-Fluoro
  misc_feature (16)..(18): 2'-deoxy-2'-Fluoro
  misc_feature (20)..(20): Phosphorothioate 3'-Internucleotide Linkage
  misc_feature (21)..(21): n is thymidine
uucucuggcaguaggucugnn

SEQ ID NO: 1560 - RNA, 21 nt, Artificial Sequence
  Description of Artificial Sequence:  siNA sense region
  misc_feature (2)..(3): 2'-deoxy-2'-Fluoro
  misc_feature (8)..(8): 2'-deoxy-2'-Fluoro
  misc_feature (10)..(11): 2'-deoxy-2'-Fluoro
  misc_feature (13)..(13): 2'-deoxy-2'-Fluoro
  misc_feature (15)..(19): 2'-deoxy-2'-Fluoro
  misc_feature (20)..(20): Phosphorothioate 3'-Internucleotide Linkage
  misc_feature (21)..(21): n is thymidine
gcugagguguugugucuucnn

SEQ ID NO: 1561 - RNA, 21 nt, Artificial Sequence
  Description of Artificial Sequence:  siNA sense region
  misc_feature (1)..(2): 2'-deoxy-2'-Fluoro
  misc_feature (4)..(5): 2'-deoxy-2'-Fluoro
  misc_feature (11)..(14): 2'-deoxy-2'-Fluoro
  misc_feature (16)..(16): 2'-deoxy-2'-Fluoro
  misc_feature (18)..(18): 2'-deoxy-2'-Fluoro
  misc_feature (20)..(20): Phosphorothioate 3'-Internucleotide Linkage
  misc_feature (21)..(21): n is thymidine
cugucaggaacccugugugnn

SEQ ID NO: 1562 - RNA, 21 nt, Artificial Sequence
  Description of Artificial Sequence:  siNA sense region
  misc_feature (3)..(3): 2'-deoxy-2'-Fluoro
  misc_feature (5)..(6): 2'-deoxy-2'-Fluoro
  misc_feature (9)..(9): 2'-deoxy-2'-Fluoro
  misc_feature (12)..(13): 2'-deoxy-2'-Fluoro
  misc_feature (18)..(19): 2'-deoxy-2'-Fluoro
  misc_feature (20)..(20): Phosphorothioate 3'-Internucleotide Linkage
  misc_feature (21)..(21): n is thymidine
gaugccagugacuagagccnn

SEQ ID NO: 1563 - RNA, 21 nt, Artificial Sequence
  Description of Artificial Sequence:  siNA sense region
  misc_feature (1)..(6): 2'-deoxy-2'-Fluoro
  misc_feature (12)..(13): 2'-deoxy-2'-Fluoro
  misc_feature (17)..(18): 2'-deoxy-2'-Fluoro
  misc_feature (20)..(20): Phosphorothioate 3'-Internucleotide Linkage
  misc_feature (21)..(21): n is thymidine
uuuucuaaaagcugggccann

SEQ ID NO: 1564 - RNA, 21 nt, Artificial Sequence
  Description of Artificial Sequence:  siNA sense region
  misc_feature (2)..(2): 2'-deoxy-2'-Fluoro
  misc_feature (4)..(5): 2'-deoxy-2'-Fluoro
  misc_feature (9)..(10): 2'-deoxy-2'-Fluoro
  misc_feature (13)..(16): 2'-deoxy-2'-Fluoro
  misc_feature (18)..(18): 2'-deoxy-2'-Fluoro
  misc_feature (20)..(20): Phosphorothioate 3'-Internucleotide Linkage
  misc_feature (21)..(21): n is thymidine
acaccgagucaacuccacann

SEQ ID NO: 1565 - RNA, 21 nt, Artificial Sequence
  Description of Artificial Sequence:  siNA sense region
  misc_feature (1)..(1): 2'-deoxy-2'-Fluoro
  misc_feature (6)..(6): 2'-deoxy-2'-Fluoro
  misc_feature (10)..(15): 2'-deoxy-2'-Fluoro
  misc_feature (17)..(18): 2'-deoxy-2'-Fluoro
  misc_feature (20)..(20): Phosphorothioate 3'-Internucleotide Linkage
  misc_feature (21)..(21): n is thymidine
caaggcaaauuucucaccann

SEQ ID NO: 1566 - RNA, 21 nt, Artificial Sequence
  Description of Artificial Sequence:  siNA sense region
  misc_feature (3)..(4): 2'-deoxy-2'-Fluoro
  misc_feature (6)..(6): 2'-deoxy-2'-Fluoro
  misc_feature (9)..(9): 2'-deoxy-2'-Fluoro
  misc_feature (12)..(13): 2'-deoxy-2'-Fluoro
  misc_feature (15)..(15): 2'-deoxy-2'-Fluoro
  misc_feature (17)..(17): 2'-deoxy-2'-Fluoro
  misc_feature (20)..(20): Phosphorothioate 3'-Internucleotide Linkage
  misc_feature (21)..(21): n is thymidine
agcuguaacagucaugcgann

SEQ ID NO: 1567 - RNA, 21 nt, Artificial Sequence
  Description of Artificial Sequence:  siNA sense region
  misc_feature (1)..(1): 2'-deoxy-2'-Fluoro
  misc_feature (1)..(1): 5'-3 attached terminal deoxyabasic moeity
  misc_feature (2)..(2): deoxy Adenosine
  misc_feature (3)..(3): deoxy Guanosine
  misc_feature (4)..(4): deoxy Adenosine
  misc_feature (5)..(7): 2'-deoxy-2'-Fluoro
  misc_feature (8)..(8): deoxy Adenosine
  misc_feature (9)..(10): 2'-deoxy-2'-Fluoro
  misc_feature (11)..(11): deoxy Guanosine
  misc_feature (12)..(13): 2'-deoxy-2'-Fluoro
  misc_feature (14)..(14): deoxy Adenosine
  misc_feature (15)..(15): deoxy Guanosine
  misc_feature (16)..(16): deoxy Adenosine
  misc_feature (17)..(17): deoxy Guanosine
  misc_feature (18)..(19): deoxy Adenosine
  misc_feature (20)..(20): n is thymidine
  misc_feature (21)..(21): 3'-3 attached terminal deoxyabasic moeity
cagaccuacugccagagaann

SEQ ID NO: 1568 - RNA, 21 nt, Artificial Sequence
  Description of Artificial Sequence:  siNA sense region
  misc_feature (1)..(1): 5'-3 attached terminal deoxyabasic moeity
  misc_feature (1)..(1): deoxy Guanosine
  misc_feature (2)..(3): deoxy Adenosine
  misc_feature (4)..(4): deoxy Guanosine
  misc_feature (5)..(5): deoxy Adenosine
  misc_feature (6)..(6): 2'-deoxy-2'-Fluoro
  misc_feature (7)..(7): deoxy Adenosine
  misc_feature (8)..(8): 2'-deoxy-2'-Fluoro
  misc_feature (9)..(10): deoxy Adenosine
  misc_feature (11)..(11): 2'-deoxy-2'-Fluoro
  misc_feature (12)..(12): deoxy Adenosine
  misc_feature (13)..(16): 2'-deoxy-2'-Fluoro
  misc_feature (17)..(17): deoxy Adenosine
  misc_feature (18)..(18): deoxy Guanosine
  misc_feature (19)..(19): 2'-deoxy-2'-Fluoro
  misc_feature (20)..(20): n is thymidine
  misc_feature (21)..(21): 3'-3 attached terminal deoxyabasic moeity
gaagacacaacaccucagcnn

SEQ ID NO: 1569 - RNA, 21 nt, Artificial Sequence
  Description of Artificial Sequence:  siNA sense region
  misc_feature (1)..(1): 2'-deoxy-2'-Fluoro
  misc_feature (1)..(1): 5'-3 attached terminal deoxyabasic moeity
  misc_feature (2)..(2): deoxy Adenosine
  misc_feature (3)..(3): 2'-deoxy-2'-Fluoro
  misc_feature (4)..(4): deoxy Adenosine
  misc_feature (5)..(5): 2'-deoxy-2'-Fluoro
  misc_feature (6)..(6): deoxy Adenosine
  misc_feature (7)..(9): deoxy Guanosine
  misc_feature (10)..(14): 2'-deoxy-2'-Fluoro
  misc_feature (15)..(15): deoxy Guanosine
  misc_feature (16)..(16): deoxy Adenosine
  misc_feature (17)..(17): 2'-deoxy-2'-Fluoro
  misc_feature (18)..(18): deoxy Adenosine
  misc_feature (19)..(19): deoxy Guanosine
  misc_feature (20)..(20): n is thymidine
  misc_feature (21)..(21): 3'-3 attached terminal deoxyabasic moeity
cacacaggguuccugacagnn

SEQ ID NO: 1570 - RNA, 21 nt, Artificial Sequence
  Description of Artificial Sequence:  siNA sense region
  misc_feature (1)..(1): 5'-3 attached terminal deoxyabasic moeity
  misc_feature (1)..(2): deoxy Guanosine
  misc_feature (3)..(6): 2'-deoxy-2'-Fluoro
  misc_feature (7)..(7): deoxy Adenosine
  misc_feature (8)..(8): deoxy Guanosine
  misc_feature (9)..(10): 2'-deoxy-2'-Fluoro
  misc_feature (11)..(11): deoxy Adenosine
  misc_feature (12)..(13): 2'-deoxy-2'-Fluoro
  misc_feature (14)..(15): deoxy Guanosine
  misc_feature (16)..(16): 2'-deoxy-2'-Fluoro
  misc_feature (17)..(17): deoxy Adenosine
  misc_feature (18)..(19): 2'-deoxy-2'-Fluoro
  misc_feature (20)..(20): n is thymidine
  misc_feature (21)..(21): 3'-3 attached terminal deoxyabasic moeity
ggcucuagucacuggcaucnn

SEQ ID NO: 1571 - RNA, 21 nt, Artificial Sequence
  Description of Artificial Sequence:  siNA sense region
  misc_feature (1)..(1): 2'-deoxy-2'-Fluoro
  misc_feature (1)..(1): 5'-3 attached terminal deoxyabasic moeity
  misc_feature (2)..(3): deoxy Guanosine
  misc_feature (4)..(6): 2'-deoxy-2'-Fluoro
  misc_feature (7)..(7): deoxy Adenosine
  misc_feature (8)..(8): deoxy Guanosine
  misc_feature (9)..(13): 2'-deoxy-2'-Fluoro
  misc_feature (14)..(14): deoxy Adenosine
  misc_feature (15)..(15): deoxy Guanosine
  misc_feature (16)..(19): deoxy Adenosine
  misc_feature (20)..(20): n is thymidine
  misc_feature (21)..(21): 3'-3 attached terminal deoxyabasic moeity
uggcccagcuuuuagaaaann

SEQ ID NO: 1572 - RNA, 21 nt, Artificial Sequence
  Description of Artificial Sequence:  siNA sense region
  misc_feature (1)..(1): 5'-3 attached terminal deoxyabasic moeity
  misc_feature (1)..(1): 2'-deoxy-2'-Fluoro
  misc_feature (2)..(2): deoxy Guanosine
  misc_feature (3)..(3): 2'-deoxy-2'-Fluoro
  misc_feature (4)..(5): deoxy Guanosine
  misc_feature (6)..(6): deoxy Adenosine
  misc_feature (7)..(7): deoxy Guanosine
  misc_feature (8)..(9): 2'-deoxy-2'-Fluoro
  misc_feature (10)..(10): deoxy Guanosine
  misc_feature (11)..(11): deoxy Adenosine
  misc_feature (12)..(14): 2'-deoxy-2'-Fluoro
  misc_feature (15)..(16): deoxy Guanosine
  misc_feature (17)..(17): 2'-deoxy-2'-Fluoro
  misc_feature (18)..(18): deoxy Guanosine
  misc_feature (19)..(19): 2'-deoxy-2'-Fluoro
  misc_feature (20)..(20): n is thymidine
  misc_feature (21)..(21): 3'-3 attached terminal deoxyabasic moeity
uguggaguugacucggugunn

SEQ ID NO: 1573 - RNA, 21 nt, Artificial Sequence
  Description of Artificial Sequence:  siNA sense region
  misc_feature (1)..(1): 2'-deoxy-2'-Fluoro
  misc_feature (1)..(1): 5'-3 attached terminal deoxyabasic moeity
  misc_feature (2)..(3): deoxy Guanosine
  misc_feature (4)..(4): 2'-deoxy-2'-Fluoro
  misc_feature (5)..(5): deoxy Guanosine
  misc_feature (6)..(6): deoxy Adenosine
  misc_feature (7)..(7): deoxy Guanosine
  misc_feature (8)..(10): deoxy Adenosine
  misc_feature (11)..(13): 2'-deoxy-2'-Fluoro
  misc_feature (14)..(14): deoxy Guanosine
  misc_feature (15)..(18): 2'-deoxy-2'-Fluoro
  misc_feature (19)..(19): deoxy Guanosine
  misc_feature (20)..(20): n is thymidine
  misc_feature (21)..(21): 3'-3 attached terminal deoxyabasic moeity
uggugagaaauuugccuugnn

SEQ ID NO: 1574 - RNA, 21 nt, Artificial Sequence
  Description of Artificial Sequence:  siNA sense region
  misc_feature (1)..(1): 5'-3 attached terminal deoxyabasic moeity
  misc_feature (1)..(2): 2'-deoxy-2'-Fluoro
  misc_feature (3)..(3): deoxy Guanosine
  misc_feature (4)..(4): 2'-deoxy-2'-Fluoro
  misc_feature (5)..(5): deoxy Adenosine
  misc_feature (6)..(6): 2'-deoxy-2'-Fluoro
  misc_feature (7)..(7): deoxy Guanosine
  misc_feature (8)..(8): deoxy Adenosine
  misc_feature (9)..(10): 2'-deoxy-2'-Fluoro
  misc_feature (11)..(11): deoxy Guanosine
  misc_feature (12)..(13): 2'-deoxy-2'-Fluoro
  misc_feature (14)..(14): deoxy Adenosine
  misc_feature (15)..(15): 2'-deoxy-2'-Fluoro
  misc_feature (16)..(16): deoxy Adenosine
  misc_feature (17)..(17): deoxy Guanosine
  misc_feature (18)..(19): 2'-deoxy-2'-Fluoro
  misc_feature (20)..(20): n is thymidine
  misc_feature (21)..(21): 3'-3 attached terminal deoxyabasic moeity
ucgcaugacuguuacagcunn

SEQ ID NO: 1575 - RNA, 21 nt, Artificial Sequence
  Description of Artificial Sequence:  siNA sense region
  misc_feature (1)..(6): 2'-deoxy-2'-Fluoro
  misc_feature (7)..(8): deoxy Guanosine
  misc_feature (9)..(9): 2'-deoxy-2'-Fluoro
  misc_feature (10)..(10): deoxy Adenosine
  misc_feature (11)..(11): deoxy Guanosine
  misc_feature (12)..(12): 2'-deoxy-2'-Fluoro
  misc_feature (13)..(13): deoxy Adenosine
  misc_feature (14)..(15): deoxy Guanosine
  misc_feature (16)..(18): 2'-deoxy-2'-Fluoro
  misc_feature (19)..(19): deoxy Guanosine
  misc_feature (20)..(20): Phosphorothioate 3'-Internucleotide Linkage
  misc_feature (21)..(21): n is thymidine
uucucuggcaguaggucugnn

SEQ ID NO: 1576 - RNA, 21 nt, Artificial Sequence
  Description of Artificial Sequence:  siNA sense region
  misc_feature (1)..(1): deoxy Guanosine
  misc_feature (2)..(3): 2'-deoxy-2'-Fluoro
  misc_feature (4)..(4): deoxy Guanosine
  misc_feature (5)..(5): deoxy Adenosine
  misc_feature (6)..(7): deoxy Guanosine
  misc_feature (8)..(8): 2'-deoxy-2'-Fluoro
  misc_feature (9)..(9): deoxy Guanosine
  misc_feature (10)..(11): 2'-deoxy-2'-Fluoro
  misc_feature (12)..(12): deoxy Guanosine
  misc_feature (13)..(13): 2'-deoxy-2'-Fluoro
  misc_feature (14)..(14): deoxy Guanosine
  misc_feature (15)..(19): 2'-deoxy-2'-Fluoro
  misc_feature (20)..(20): Phosphorothioate 3'-Internucleotide Linkage
  misc_feature (21)..(21): n is thymidine
gcugagguguugugucuucnn

SEQ ID NO: 1577 - RNA, 21 nt, Artificial Sequence
  Description of Artificial Sequence:  siNA sense region
  misc_feature (1)..(2): 2'-deoxy-2'-Fluoro
  misc_feature (3)..(3): deoxy Guanosine
  misc_feature (4)..(5): 2'-deoxy-2'-Fluoro
  misc_feature (6)..(6): deoxy Adenosine
  misc_feature (7)..(8): deoxy Guanosine
  misc_feature (9)..(10): deoxy Adenosine
  misc_feature (11)..(14): 2'-deoxy-2'-Fluoro
  misc_feature (15)..(15): deoxy Guanosine
  misc_feature (16)..(16): 2'-deoxy-2'-Fluoro
  misc_feature (17)..(17): deoxy Guanosine
  misc_feature (18)..(18): 2'-deoxy-2'-Fluoro
  misc_feature (19)..(19): deoxy Guanosine
  misc_feature (20)..(20): Phosphorothioate 3'-Internucleotide Linkage
  misc_feature (21)..(21): n is thymidine
cugucaggaacccugugugnn

SEQ ID NO: 1578 - RNA, 21 nt, Artificial Sequence
  Description of Artificial Sequence:  siNA sense region
  misc_feature (1)..(1): deoxy Guanosine
  misc_feature (2)..(2): deoxy Adenosine
  misc_feature (3)..(3): 2'-deoxy-2'-Fluoro
  misc_feature (4)..(4): deoxy Guanosine
  misc_feature (5)..(6): 2'-deoxy-2'-Fluoro
  misc_feature (7)..(7): deoxy Adenosine
  misc_feature (8)..(8): deoxy Guanosine
  misc_feature (9)..(9): 2'-deoxy-2'-Fluoro
  misc_feature (10)..(10): deoxy Guanosine
  misc_feature (11)..(11): deoxy Adenosine
  misc_feature (12)..(13): 2'-deoxy-2'-Fluoro
  misc_feature (14)..(14): deoxy Adenosine
  misc_feature (15)..(15): deoxy Guanosine
  misc_feature (16)..(16): deoxy Adenosine
  misc_feature (17)..(17): deoxy Guanosine
  misc_feature (18)..(19): 2'-deoxy-2'-Fluoro
  misc_feature (20)..(20): Phosphorothioate 3'-Internucleotide Linkage
  misc_feature (21)..(21): n is thymidine
gaugccagugacuagagccnn

SEQ ID NO: 1579 - RNA, 21 nt, Artificial Sequence
  Description of Artificial Sequence:  siNA sense region
  misc_feature (1)..(6): 2'-deoxy-2'-Fluoro
  misc_feature (7)..(10): deoxy Adenosine
  misc_feature (11)..(11): deoxy Guanosine
  misc_feature (12)..(13): 2'-deoxy-2'-Fluoro
  misc_feature (14)..(16): deoxy Guanosine
  misc_feature (17)..(18): 2'-deoxy-2'-Fluoro
  misc_feature (19)..(19): deoxy Adenosine
  misc_feature (20)..(20): Phosphorothioate 3'-Internucleotide Linkage
  misc_feature (21)..(21): n is thymidine
uuuucuaaaagcugggccann

SEQ ID NO: 1580 - RNA, 21 nt, Artificial Sequence
  Description of Artificial Sequence:  siNA sense region
  misc_feature (1)..(1): deoxy Adenosine
  misc_feature (2)..(2): 2'-deoxy-2'-Fluoro
  misc_feature (3)..(3): deoxy Adenosine
  misc_feature (4)..(5): 2'-deoxy-2'-Fluoro
  misc_feature (6)..(6): deoxy Guanosine
  misc_feature (7)..(7): deoxy Adenosine
  misc_feature (8)..(8): deoxy Guanosine
  misc_feature (9)..(10): 2'-deoxy-2'-Fluoro
  misc_feature (11)..(12): deoxy Adenosine
  misc_feature (13)..(16): 2'-deoxy-2'-Fluoro
  misc_feature (17)..(17): deoxy Adenosine
  misc_feature (18)..(18): 2'-deoxy-2'-Fluoro
  misc_feature (19)..(19): deoxy Adenosine
  misc_feature (20)..(20): Phosphorothioate 3'-Internucleotide Linkage
  misc_feature (21)..(21): n is thymidine
acaccgagucaacuccacann

SEQ ID NO: 1581 - RNA, 21 nt, Artificial Sequence
  Description of Artificial Sequence:  siNA sense region
  misc_feature (1)..(1): 2'-deoxy-2'-Fluoro
  misc_feature (2)..(3): deoxy Adenosine
  misc_feature (4)..(5): deoxy Guanosine
  misc_feature (6)..(6): 2'-deoxy-2'-Fluoro
  misc_feature (7)..(9): deoxy Adenosine
  misc_feature (10)..(15): 2'-deoxy-2'-Fluoro
  misc_feature (16)..(16): deoxy Adenosine
  misc_feature (17)..(18): 2'-deoxy-2'-Fluoro
  misc_feature (19)..(19): deoxy Adenosine
  misc_feature (20)..(20): Phosphorothioate 3'-Internucleotide Linkage
  misc_feature (21)..(21): n is thymidine
caaggcaaauuucucaccann

SEQ ID NO: 1582 - RNA, 21 nt, Artificial Sequence
  Description of Artificial Sequence:  siNA sense region
  misc_feature (1)..(1): deoxy Adenosine
  misc_feature (2)..(2): deoxy Guanosine
  misc_feature (3)..(4): 2'-deoxy-2'-Fluoro
  misc_feature (5)..(5): deoxy Guanosine
  misc_feature (6)..(6): 2'-deoxy-2'-Fluoro
  misc_feature (7)..(8): deoxy Adenosine
  misc_feature (9)..(9): 2'-deoxy-2'-Fluoro
  misc_feature (10)..(10): deoxy Adenosine
  misc_feature (11)..(11): deoxy Guanosine
  misc_feature (12)..(13): 2'-deoxy-2'-Fluoro
  misc_feature (14)..(14): deoxy Adenosine
  misc_feature (15)..(15): 2'-deoxy-2'-Fluoro
  misc_feature (16)..(16): deoxy Guanosine
  misc_feature (17)..(17): 2'-deoxy-2'-Fluoro
  misc_feature (18)..(18): deoxy Guanosine
  misc_feature (19)..(19): deoxy Adenosine
  misc_feature (20)..(20): Phosphorothioate 3'-Internucleotide Linkage
  misc_feature (21)..(21): n is thymidine
agcuguaacagucaugcgann

SEQ ID NO: 1583 - RNA, 21 nt, Artificial Sequence
  Description of Artificial Sequence:  siNA sense region
  misc_feature (1)..(1): 2'-deoxy-2'-Fluoro
  misc_feature (1)..(1): 5'-3 attached terminal deoxyabasic moeity
  misc_feature (2)..(4): 2'-O-methyl
  misc_feature (5)..(7): 2'-deoxy-2'-Fluoro
  misc_feature (8)..(8): 2'-O-methyl
  misc_feature (9)..(10): 2'-deoxy-2'-Fluoro
  misc_feature (11)..(11): 2'-O-methyl
  misc_feature (12)..(13): 2'-deoxy-2'-Fluoro
  misc_feature (14)..(19): 2'-O-methyl
  misc_feature (20)..(20): n is thymidine
  misc_feature (21)..(21): 3'-3 attached terminal deoxyabasic moeity
cagaccuacugccagagaann

SEQ ID NO: 1584 - RNA, 21 nt, Artificial Sequence
  Description of Artificial Sequence:  siNA sense region
  misc_feature (1)..(1): 5'-3 attached terminal deoxyabasic moeity
  misc_feature (1)..(5): 2'-O-methyl
  misc_feature (6)..(6): 2'-deoxy-2'-Fluoro
  misc_feature (7)..(7): 2'-O-methyl
  misc_feature (8)..(8): 2'-deoxy-2'-Fluoro
  misc_feature (9)..(10): 2'-O-methyl
  misc_feature (11)..(11): 2'-deoxy-2'-Fluoro
  misc_feature (12)..(12): 2'-O-methyl
  misc_feature (13)..(16): 2'-deoxy-2'-Fluoro
  misc_feature (17)..(18): 2'-O-methyl
  misc_feature (19)..(19): 2'-deoxy-2'-Fluoro
  misc_feature (20)..(20): n is thymidine
  misc_feature (21)..(21): 3'-3 attached terminal deoxyabasic moeity
gaagacacaacaccucagcnn

SEQ ID NO: 1585 - RNA, 21 nt, Artificial Sequence
  Description of Artificial Sequence:  siNA sense region
  misc_feature (1)..(1): 2'-deoxy-2'-Fluoro
  misc_feature (1)..(1): 5'-3 attached terminal deoxyabasic moeity
  misc_feature (2)..(2): 2'-O-methyl
  misc_feature (3)..(3): 2'-deoxy-2'-Fluoro
  misc_feature (4)..(4): 2'-O-methyl
  misc_feature (5)..(5): 2'-deoxy-2'-Fluoro
  misc_feature (6)..(9): 2'-O-methyl
  misc_feature (10)..(14): 2'-deoxy-2'-Fluoro
  misc_feature (15)..(16): 2'-O-methyl
  misc_feature (17)..(17): 2'-deoxy-2'-Fluoro
  misc_feature (18)..(19): 2'-O-methyl
  misc_feature (20)..(20): n is thymidine
  misc_feature (21)..(21): 3'-3 attached terminal deoxyabasic moeity
cacacaggguuccugacagnn

SEQ ID NO: 1586 - RNA, 21 nt, Artificial Sequence
  Description of Artificial Sequence:  siNA sense region
  misc_feature (1)..(1): 5'-3 attached terminal deoxyabasic moeity
  misc_feature (1)..(2): 2'-O-methyl
  misc_feature (3)..(6): 2'-deoxy-2'-Fluoro
  misc_feature (7)..(8): 2'-O-methyl
  misc_feature (9)..(10): 2'-deoxy-2'-Fluoro
  misc_feature (11)..(11): 2'-O-methyl
  misc_feature (12)..(13): 2'-deoxy-2'-Fluoro
  misc_feature (14)..(15): 2'-O-methyl
  misc_feature (16)..(16): 2'-deoxy-2'-Fluoro
  misc_feature (17)..(17): 2'-O-methyl
  misc_feature (18)..(19): 2'-deoxy-2'-Fluoro
  misc_feature (20)..(20): n is thymidine
  misc_feature (21)..(21): 3'-3 attached terminal deoxyabasic moeity
ggcucuagucacuggcaucnn

SEQ ID NO: 1587 - RNA, 21 nt, Artificial Sequence
  Description of Artificial Sequence:  siNA sense region
  misc_feature (1)..(1): 2'-deoxy-2'-Fluoro
  misc_feature (1)..(1): 5'-3 attached terminal deoxyabasic moeity
  misc_feature (2)..(3): 2'-O-methyl
  misc_feature (4)..(6): 2'-deoxy-2'-Fluoro
  misc_feature (7)..(8): 2'-O-methyl
  misc_feature (9)..(13): 2'-deoxy-2'-Fluoro
  misc_feature (14)..(19): 2'-O-methyl
  misc_feature (20)..(20): n is thymidine
  misc_feature (21)..(21): 3'-3 attached terminal deoxyabasic moeity
uggcccagcuuuuagaaaann

SEQ ID NO: 1588 - RNA, 21 nt, Artificial Sequence
  Description of Artificial Sequence:  siNA sense region
  misc_feature (1)..(1): 5'-3 attached terminal deoxyabasic moeity
  misc_feature (1)..(1): 2'-deoxy-2'-Fluoro
  misc_feature (2)..(2): 2'-O-methyl
  misc_feature (3)..(3): 2'-deoxy-2'-Fluoro
  misc_feature (4)..(7): 2'-O-methyl
  misc_feature (8)..(9): 2'-deoxy-2'-Fluoro
  misc_feature (10)..(11): 2'-O-methyl
  misc_feature (12)..(14): 2'-deoxy-2'-Fluoro
  misc_feature (15)..(16): 2'-O-methyl
  misc_feature (17)..(17): 2'-deoxy-2'-Fluoro
  misc_feature (18)..(18): 2'-O-methyl
  misc_feature (19)..(19): 2'-deoxy-2'-Fluoro
  misc_feature (20)..(20): n is thymidine
  misc_feature (21)..(21): 3'-3 attached terminal deoxyabasic moeity
uguggaguugacucggugunn

SEQ ID NO: 1589 - RNA, 21 nt, Artificial Sequence
  Description of Artificial Sequence:  siNA sense region
  misc_feature (1)..(1): 2'-deoxy-2'-Fluoro
  misc_feature (1)..(1): 5'-3 attached terminal deoxyabasic moeity
  misc_feature (2)..(3): 2'-O-methyl
  misc_feature (4)..(4): 2'-deoxy-2'-Fluoro
  misc_feature (5)..(10): 2'-O-methyl
  misc_feature (11)..(13): 2'-deoxy-2'-Fluoro
  misc_feature (14)..(14): 2'-O-methyl
  misc_feature (15)..(18): 2'-deoxy-2'-Fluoro
  misc_feature (19)..(19): 2'-O-methyl
  misc_feature (20)..(20): n is thymidine
  misc_feature (21)..(21): 3'-3 attached terminal deoxyabasic moeity
uggugagaaauuugccuugnn

SEQ ID NO: 1590 - RNA, 21 nt, Artificial Sequence
  Description of Artificial Sequence:  siNA sense region
  misc_feature (1)..(1): 5'-3 attached terminal deoxyabasic moeity
  misc_feature (1)..(2): 2'-deoxy-2'-Fluoro
  misc_feature (3)..(3): 2'-O-methyl
  misc_feature (4)..(4): 2'-deoxy-2'-Fluoro
  misc_feature (5)..(5): 2'-O-methyl
  misc_feature (6)..(6): 2'-deoxy-2'-Fluoro
  misc_feature (7)..(8): 2'-O-methyl
  misc_feature (9)..(10): 2'-deoxy-2'-Fluoro
  misc_feature (11)..(11): 2'-O-methyl
  misc_feature (12)..(13): 2'-deoxy-2'-Fluoro
  misc_feature (14)..(14): 2'-O-methyl
  misc_feature (15)..(15): 2'-deoxy-2'-Fluoro
  misc_feature (16)..(17): 2'-O-methyl
  misc_feature (18)..(19): 2'-deoxy-2'-Fluoro
  misc_feature (20)..(20): n is thymidine
  misc_feature (21)..(21): 3'-3 attached terminal deoxyabasic moeity
ucgcaugacuguuacagcunn

SEQ ID NO: 1591 - RNA, 21 nt, Artificial Sequence
  Description of Artificial Sequence:  siNA sense region
  misc_feature (1)..(6): 2'-deoxy-2'-Fluoro
  misc_feature (7)..(8): 2'-O-methyl
  misc_feature (9)..(9): 2'-deoxy-2'-Fluoro
  misc_feature (10)..(11): 2'-O-methyl
  misc_feature (12)..(12): 2'-deoxy-2'-Fluoro
  misc_feature (13)..(15): 2'-O-methyl
  misc_feature (16)..(18): 2'-deoxy-2'-Fluoro
  misc_feature (19)..(19): 2'-O-methyl
  misc_feature (20)..(20): Phosphorothioate 3'-Internucleotide Linkage
  misc_feature (21)..(21): n is thymidine
uucucuggcaguaggucugnn

SEQ ID NO: 1592 - RNA, 21 nt, Artificial Sequence
  Description of Artificial Sequence:  siNA sense region
  misc_feature (1)..(1): 2'-O-methyl
  misc_feature (2)..(3): 2'-deoxy-2'-Fluoro
  misc_feature (4)..(7): 2'-O-methyl
  misc_feature (8)..(8): 2'-deoxy-2'-Fluoro
  misc_feature (9)..(9): 2'-O-methyl
  misc_feature (10)..(11): 2'-deoxy-2'-Fluoro
  misc_feature (12)..(12): 2'-O-methyl
  misc_feature (13)..(13): 2'-deoxy-2'-Fluoro
  misc_feature (14)..(14): 2'-O-methyl
  misc_feature (15)..(19): 2'-deoxy-2'-Fluoro
  misc_feature (20)..(20): Phosphorothioate 3'-Internucleotide Linkage
  misc_feature (21)..(21): n is thymidine
gcugagguguugugucuucnn

SEQ ID NO: 1593 - RNA, 21 nt, Artificial Sequence
  Description of Artificial Sequence:  siNA sense region
  misc_feature (1)..(2): 2'-deoxy-2'-Fluoro
  misc_feature (3)..(3): 2'-O-methyl
  misc_feature (4)..(5): 2'-deoxy-2'-Fluoro
  misc_feature (6)..(10): 2'-O-methyl
  misc_feature (11)..(14): 2'-deoxy-2'-Fluoro
  misc_feature (15)..(15): 2'-O-methyl
  misc_feature (16)..(16): 2'-deoxy-2'-Fluoro
  misc_feature (17)..(17): 2'-O-methyl
  misc_feature (18)..(18): 2'-deoxy-2'-Fluoro
  misc_feature (19)..(19): 2'-O-methyl
  misc_feature (20)..(20): Phosphorothioate 3'-Internucleotide Linkage
  misc_feature (21)..(21): n is thymidine
cugucaggaacccugugugnn

SEQ ID NO: 1594 - RNA, 21 nt, Artificial Sequence
  Description of Artificial Sequence:  siNA sense region
  misc_feature (1)..(2): 2'-O-methyl
  misc_feature (3)..(3): 2'-deoxy-2'-Fluoro
  misc_feature (4)..(4): 2'-O-methyl
  misc_feature (5)..(6): 2'-deoxy-2'-Fluoro
  misc_feature (7)..(8): 2'-O-methyl
  misc_feature (9)..(9): 2'-deoxy-2'-Fluoro
  misc_feature (10)..(11): 2'-O-methyl
  misc_feature (12)..(13): 2'-deoxy-2'-Fluoro
  misc_feature (14)..(17): 2'-O-methyl
  misc_feature (18)..(19): 2'-deoxy-2'-Fluoro
  misc_feature (19)..(19): 2'-O-methyl
  misc_feature (20)..(20): Phosphorothioate 3'-Internucleotide Linkage
  misc_feature (21)..(21): n is thymidine
gaugccagugacuagagccnn

SEQ ID NO: 1595 - RNA, 21 nt, Artificial Sequence
  Description of Artificial Sequence:  siNA sense region
  misc_feature (1)..(6): 2'-deoxy-2'-Fluoro
  misc_feature (7)..(11): 2'-O-methyl
  misc_feature (12)..(13): 2'-deoxy-2'-Fluoro
  misc_feature (14)..(16): 2'-O-methyl
  misc_feature (17)..(18): 2'-deoxy-2'-Fluoro
  misc_feature (19)..(19): 2'-O-methyl
  misc_feature (20)..(20): Phosphorothioate 3'-Internucleotide Linkage
  misc_feature (21)..(21): n is thymidine
uuuucuaaaagcugggccann

SEQ ID NO: 1596 - RNA, 21 nt, Artificial Sequence
  Description of Artificial Sequence:  siNA sense region
  misc_feature (1)..(1): 2'-O-methyl
  misc_feature (2)..(2): 2'-deoxy-2'-Fluoro
  misc_feature (3)..(3): 2'-O-methyl
  misc_feature (4)..(5): 2'-deoxy-2'-Fluoro
  misc_feature (6)..(8): 2'-O-methyl
  misc_feature (9)..(10): 2'-deoxy-2'-Fluoro
  misc_feature (11)..(12): 2'-O-methyl
  misc_feature (13)..(16): 2'-deoxy-2'-Fluoro
  misc_feature (17)..(17): 2'-O-methyl
  misc_feature (18)..(18): 2'-deoxy-2'-Fluoro
  misc_feature (19)..(19): 2'-O-methyl
  misc_feature (20)..(20): Phosphorothioate 3'-Internucleotide Linkage
  misc_feature (21)..(21): n is thymidine
acaccgagucaacuccacann

SEQ ID NO: 1597 - RNA, 21 nt, Artificial Sequence
  Description of Artificial Sequence:  siNA sense region
  misc_feature (1)..(1): 2'-deoxy-2'-Fluoro
  misc_feature (2)..(5): 2'-O-methyl
  misc_feature (6)..(6): 2'-deoxy-2'-Fluoro
  misc_feature (7)..(9): 2'-O-methyl
  misc_feature (10)..(15): 2'-deoxy-2'-Fluoro
  misc_feature (16)..(16): 2'-O-methyl
  misc_feature (17)..(18): 2'-deoxy-2'-Fluoro
  misc_feature (19)..(19): 2'-O-methyl
  misc_feature (20)..(20): Phosphorothioate 3'-Internucleotide Linkage
  misc_feature (21)..(21): n is thymidine
caaggcaaauuucucaccann

SEQ ID NO: 1598 - RNA, 21 nt, Artificial Sequence
  Description of Artificial Sequence:  siNA sense region
  misc_feature (1)..(2): 2'-O-methyl
  misc_feature (3)..(4): 2'-deoxy-2'-Fluoro
  misc_feature (5)..(5): 2'-O-methyl
  misc_feature (6)..(6): 2'-deoxy-2'-Fluoro
  misc_feature (7)..(8): 2'-O-methyl
  misc_feature (9)..(9): 2'-deoxy-2'-Fluoro
  misc_feature (10)..(11): 2'-O-methyl
  misc_feature (12)..(13): 2'-deoxy-2'-Fluoro
  misc_feature (14)..(14): 2'-O-methyl
  misc_feature (15)..(15): 2'-deoxy-2'-Fluoro
  misc_feature (16)..(16): 2'-O-methyl
  misc_feature (17)..(17): 2'-deoxy-2'-Fluoro
  misc_feature (18)..(19): 2'-O-methyl
  misc_feature (20)..(20): Phosphorothioate 3'-Internucleotide Linkage
  misc_feature (21)..(21): n is thymidine
agcuguaacagucaugcgann

SEQ ID NO: 1599 - RNA, 21 nt, Artificial Sequence
  Description of Artificial Sequence:  siNA sense region
  misc_feature (1)..(1): 5'-3 attached terminal deoxyabasic moeity
  misc_feature (20)..(20): n is thymidine
  misc_feature (21)..(21): 3'-3 attached terminal deoxyabasic moeity
cagaccuacugccagagaann

SEQ ID NO: 1600 - RNA, 21 nt, Artificial Sequence
  Description of Artificial Sequence:  siNA sense region
  misc_feature (1)..(1): 5'-3 attached terminal deoxyabasic moeity
  misc_feature (20)..(20): n is thymidine
  misc_feature (21)..(21): 3'-3 attached terminal deoxyabasic moeity
gaagacacaacaccucagcnn

SEQ ID NO: 1601 - RNA, 21 nt, Artificial Sequence
  Description of Artificial Sequence:  siNA sense region
  misc_feature (1)..(1): 5'-3 attached terminal deoxyabasic moeity
  misc_feature (20)..(20): n is thymidine
  misc_feature (21)..(21): 3'-3 attached terminal deoxyabasic moeity
cacacaggguuccugacagnn

SEQ ID NO: 1602 - RNA, 21 nt, Artificial Sequence
  Description of Artificial Sequence:  siNA sense region
  misc_feature (1)..(1): 5'-3 attached terminal deoxyabasic moeity
  misc_feature (20)..(20): n is thymidine
  misc_feature (21)..(21): 3'-3 attached terminal deoxyabasic moeity
ggcucuagucacuggcaucnn

SEQ ID NO: 1603 - RNA, 21 nt, Artificial Sequence
  Description of Artificial Sequence:  siNA sense region
  misc_feature (1)..(1): 5'-3 attached terminal deoxyabasic moeity
  misc_feature (20)..(20): n is thymidine
  misc_feature (21)..(21): 3'-3 attached terminal deoxyabasic moeity
uggcccagcuuuuagaaaann

SEQ ID NO: 1604 - RNA, 21 nt, Artificial Sequence
  Description of Artificial Sequence:  siNA sense region
  misc_feature (1)..(1): 5'-3 attached terminal deoxyabasic moeity
  misc_feature (20)..(20): n is thymidine
  misc_feature (21)..(21): 3'-3 attached terminal deoxyabasic moeity
uguggaguugacucggugunn

SEQ ID NO: 1605 - RNA, 21 nt, Artificial Sequence
  Description of Artificial Sequence:  siNA sense region
  misc_feature (1)..(1): 5'-3 attached terminal deoxyabasic moeity
  misc_feature (20)..(20): n is thymidine
  misc_feature (21)..(21): 3'-3 attached terminal deoxyabasic moeity
uggugagaaauuugccuugnn

SEQ ID NO: 1606 - RNA, 21 nt, Artificial Sequence
  Description of Artificial Sequence:  siNA sense region
  misc_feature (1)..(1): 5'-3 attached terminal deoxyabasic moeity
  misc_feature (20)..(20): n is thymidine
  misc_feature (21)..(21): 3'-3 attached terminal deoxyabasic moeity
ucgcaugacuguuacagcunn

SEQ ID NO: 1607 - RNA, 21 nt, Artificial Sequence
  Description of Artificial Sequence:  siNA sense region
  misc_feature (20)..(20): Phosphorothioate 3'-Internucleotide Linkage
  misc_feature (21)..(21): n is thymidine
uucucuggcaguaggucugnn

SEQ ID NO: 1608 - RNA, 21 nt, Artificial Sequence
  Description of Artificial Sequence:  siNA sense region
  misc_feature (20)..(20): Phosphorothioate 3'-Internucleotide Linkage
  misc_feature (21)..(21): n is thymidine
gcugagguguugugucuucnn

SEQ ID NO: 1609 - RNA, 21 nt, Artificial Sequence
  Description of Artificial Sequence:  siNA sense region
  misc_feature (20)..(20): Phosphorothioate 3'-Internucleotide Linkage
  misc_feature (21)..(21): n is thymidine
cugucaggaacccugugugnn

SEQ ID NO: 1610 - RNA, 21 nt, Artificial Sequence
  Description of Artificial Sequence:  siNA sense region
  misc_feature (20)..(20): Phosphorothioate 3'-Internucleotide Linkage
  misc_feature (21)..(21): n is thymidine
gaugccagugacuagagccnn

SEQ ID NO: 1611 - RNA, 21 nt, Artificial Sequence
  Description of Artificial Sequence:  siNA sense region
  misc_feature (20)..(20): Phosphorothioate 3'-Internucleotide Linkage
  misc_feature (21)..(21): n is thymidine
uuuucuaaaagcugggccann

SEQ ID NO: 1612 - RNA, 21 nt, Artificial Sequence
  Description of Artificial Sequence:  siNA sense region
  misc_feature (20)..(20): Phosphorothioate 3'-Internucleotide Linkage
  misc_feature (20)..(20)
  misc_feature (21)..(21): n is thymidine
acaccgagucaacuccacann

SEQ ID NO: 1613 - RNA, 21 nt, Artificial Sequence
  Description of Artificial Sequence:  siNA sense region
  misc_feature (20)..(20): Phosphorothioate 3'-Internucleotide Linkage
  misc_feature (21)..(21): n is thymidine
caaggcaaauuucucaccann

SEQ ID NO: 1614 - RNA, 21 nt, Artificial Sequence
  Description of Artificial Sequence:  siNA sense region
  misc_feature (20)..(20): Phosphorothioate 3'-Internucleotide Linkage
  misc_feature (21)..(21): n is thymidine
agcuguaacagucaugcgann

SEQ ID NO: 1615 - RNA, 21 nt, Artificial Sequence
  Description of Artificial Sequence:  siNA sense region
  misc_feature (1)..(6): 2'-deoxy-2'-Fluoro
  misc_feature (7)..(8): 2'-O-methyl
  misc_feature (9)..(9): 2'-deoxy-2'-Fluoro
  misc_feature (10)..(11): 2'-O-methyl
  misc_feature (12)..(12): 2'-deoxy-2'-Fluoro
  misc_feature (13)..(15): 2'-O-methyl
  misc_feature (16)..(18): 2'-deoxy-2'-Fluoro
  misc_feature (19)..(19): 2'-O-methyl
  misc_feature (20)..(20): n is thymidine
  misc_feature (21)..(21): 3'-3 attached terminal deoxyabasic moeity
uucucuggcaguaggucugnn

SEQ ID NO: 1616 - RNA, 21 nt, Artificial Sequence
  Description of Artificial Sequence:  siNA sense region
  misc_feature (1)..(1): 2'-O-methyl
  misc_feature (2)..(3): 2'-deoxy-2'-Fluoro
  misc_feature (4)..(7): 2'-O-methyl
  misc_feature (8)..(8): 2'-deoxy-2'-Fluoro
  misc_feature (9)..(9): 2'-O-methyl
  misc_feature (10)..(11): 2'-deoxy-2'-Fluoro
  misc_feature (12)..(12): 2'-O-methyl
  misc_feature (13)..(13): 2'-deoxy-2'-Fluoro
  misc_feature (14)..(14): 2'-O-methyl
  misc_feature (15)..(19): 2'-deoxy-2'-Fluoro
  misc_feature (20)..(20): n is thymidine
  misc_feature (21)..(21): 3'-3 attached terminal deoxyabasic moeity
gcugagguguugugucuucnn

SEQ ID NO: 1617 - RNA, 21 nt, Artificial Sequence
  Description of Artificial Sequence:  siNA sense region
  misc_feature (1)..(2): 2'-deoxy-2'-Fluoro
  misc_feature (3)..(3): 2'-O-methyl
  misc_feature (4)..(5): 2'-deoxy-2'-Fluoro
  misc_feature (6)..(10): 2'-O-methyl
  misc_feature (11)..(14): 2'-deoxy-2'-Fluoro
  misc_feature (15)..(15): 2'-O-methyl
  misc_feature (16)..(16): 2'-deoxy-2'-Fluoro
  misc_feature (17)..(17): 2'-O-methyl
  misc_feature (18)..(18): 2'-deoxy-2'-Fluoro
  misc_feature (19)..(19): 2'-O-methyl
  misc_feature (20)..(20): n is thymidine
  misc_feature (21)..(21): 3'-3 attached terminal deoxyabasic moeity
cugucaggaacccugugugnn

SEQ ID NO: 1618 - RNA, 21 nt, Artificial Sequence
  Description of Artificial Sequence:  siNA sense region
  misc_feature (1)..(2): 2'-O-methyl
  misc_feature (3)..(3): 2'-deoxy-2'-Fluoro
  misc_feature (4)..(4): 2'-O-methyl
  misc_feature (5)..(6): 2'-deoxy-2'-Fluoro
  misc_feature (7)..(8): 2'-O-methyl
  misc_feature (9)..(9): 2'-deoxy-2'-Fluoro
  misc_feature (10)..(11): 2'-O-methyl
  misc_feature (12)..(13): 2'-deoxy-2'-Fluoro
  misc_feature (14)..(17): 2'-O-methyl
  misc_feature (18)..(19): 2'-deoxy-2'-Fluoro
  misc_feature (20)..(20): n is thymidine
  misc_feature (21)..(21): 3'-3 attached terminal deoxyabasic moeity
gaugccagugacuagagccnn

SEQ ID NO: 1619 - RNA, 21 nt, Artificial Sequence
  Description of Artificial Sequence:  siNA sense region
  misc_feature (1)..(6): 2'-deoxy-2'-Fluoro
  misc_feature (7)..(11): 2'-O-methyl
  misc_feature (12)..(13): 2'-deoxy-2'-Fluoro
  misc_feature (14)..(16): 2'-O-methyl
  misc_feature (17)..(18): 2'-deoxy-2'-Fluoro
  misc_feature (19)..(19): 2'-O-methyl
  misc_feature (20)..(20): n is thymidine
  misc_feature (21)..(21): 3'-3 attached terminal deoxyabasic moeity
uuuucuaaaagcugggccann

SEQ ID NO: 1620 - RNA, 21 nt, Artificial Sequence
  Description of Artificial Sequence:  siNA sense region
  misc_feature (1)..(1): 2'-O-methyl
  misc_feature (2)..(2): 2'-deoxy-2'-Fluoro
  misc_feature (3)..(3): 2'-O-methyl
  misc_feature (4)..(5): 2'-deoxy-2'-Fluoro
  misc_feature (6)..(8): 2'-O-methyl
  misc_feature (9)..(10): 2'-deoxy-2'-Fluoro
  misc_feature (11)..(12): 2'-O-methyl
  misc_feature (13)..(16): 2'-deoxy-2'-Fluoro
  misc_feature (17)..(17): 2'-O-methyl
  misc_feature (18)..(18): 2'-deoxy-2'-Fluoro
  misc_feature (19)..(19): 2'-O-methyl
  misc_feature (20)..(20): n is thymidine
  misc_feature (21)..(21): 3'-3 attached terminal deoxyabasic moeity
acaccgagucaacuccacann

SEQ ID NO: 1621 - RNA, 21 nt, Artificial Sequence
  Description of Artificial Sequence:  siNA sense region
  misc_feature (1)..(1): 2'-deoxy-2'-Fluoro
  misc_feature (2)..(5): 2'-O-methyl
  misc_feature (6)..(6): 2'-deoxy-2'-Fluoro
  misc_feature (7)..(9): 2'-O-methyl
  misc_feature (10)..(15): 2'-deoxy-2'-Fluoro
  misc_feature (16)..(16): 2'-O-methyl
  misc_feature (17)..(18): 2'-deoxy-2'-Fluoro
  misc_feature (19)..(19): 2'-O-methyl
  misc_feature (20)..(20): n is thymidine
  misc_feature (21)..(21): 3'-3 attached terminal deoxyabasic moeity
caaggcaaauuucucaccann

SEQ ID NO: 1622 - RNA, 21 nt, Artificial Sequence
  Description of Artificial Sequence:  siNA sense region
  misc_feature (1)..(2): 2'-O-methyl
  misc_feature (3)..(4): 2'-deoxy-2'-Fluoro
  misc_feature (5)..(5): 2'-O-methyl
  misc_feature (6)..(6): 2'-deoxy-2'-Fluoro
  misc_feature (7)..(8): 2'-O-methyl
  misc_feature (9)..(9): 2'-deoxy-2'-Fluoro
  misc_feature (10)..(11): 2'-O-methyl
  misc_feature (12)..(13): 2'-deoxy-2'-Fluoro
  misc_feature (14)..(14): 2'-O-methyl
  misc_feature (15)..(15): 2'-deoxy-2'-Fluoro
  misc_feature (16)..(16): 2'-O-methyl
  misc_feature (17)..(17): 2'-deoxy-2'-Fluoro
  misc_feature (18)..(19): 2'-O-methyl
  misc_feature (20)..(20): n is thymidine
  misc_feature (21)..(21): 3'-3 attached terminal deoxyabasic moeity
agcuguaacagucaugcgann

SEQ ID NO: 1623 - RNA, 21 nt, Artificial Sequence
  Description of Artificial Sequence:  siNA sense region
  misc_feature (20)..(20): n is thymidine
  misc_feature (21)..(21): 3'-3 attached terminal deoxyabasic moeity
uucucuggcaguaggucugnn

SEQ ID NO: 1624 - RNA, 21 nt, Artificial Sequence
  Description of Artificial Sequence:  siNA sense region
  misc_feature (20)..(20): n is thymidine
  misc_feature (21)..(21): 3'-3 attached terminal deoxyabasic moeity
gcugagguguugugucuucnn

SEQ ID NO: 1625 - RNA, 21 nt, Artificial Sequence
  Description of Artificial Sequence:  siNA sense region
  misc_feature (20)..(20): n is thymidine
  misc_feature (21)..(21): 3'-3 attached terminal deoxyabasic moeity
cugucaggaacccugugugnn

SEQ ID NO: 1626 - RNA, 21 nt, Artificial Sequence
  Description of Artificial Sequence:  siNA sense region
  misc_feature (20)..(20): n is thymidine
  misc_feature (21)..(21): 3'-3 attached terminal deoxyabasic moeity
gaugccagugacuagagccnn

SEQ ID NO: 1627 - RNA, 21 nt, Artificial Sequence
  Description of Artificial Sequence:  siNA sense region
  misc_feature (20)..(20): n is thymidine
  misc_feature (21)..(21): 3'-3 attached terminal deoxyabasic moeity
uuuucuaaaagcugggccann

SEQ ID NO: 1628 - RNA, 21 nt, Artificial Sequence
  Description of Artificial Sequence:  siNA sense region
  misc_feature (20)..(20): n is thymidine
  misc_feature (21)..(21): 3'-3 attached terminal deoxyabasic moeity
acaccgagucaacuccacann

SEQ ID NO: 1629 - RNA, 21 nt, Artificial Sequence
  Description of Artificial Sequence:  siNA sense region
  misc_feature (20)..(20): n is thymidine
  misc_feature (21)..(21): 3'-3 attached terminal deoxyabasic moeity
caaggcaaauuucucaccann

SEQ ID NO: 1630 - RNA, 21 nt, Artificial Sequence
  Description of Artificial Sequence:  siNA sense region
  misc_feature (20)..(20): n is thymidine
  misc_feature (21)..(21): 3'-3 attached terminal deoxyabasic moeity
agcuguaacagucaugcgann

SEQ ID NO: 1631 - RNA, 21 nt, Artificial Sequence
  Description of Artificial Sequence:  siNA sense region
  misc_feature (20)..(21): n is thymidine
uucgaacaucagaccuacunn

SEQ ID NO: 1632 - RNA, 21 nt, Artificial Sequence
  Description of Artificial Sequence:  siNA sense region
  misc_feature (20)..(21): n is thymidine
aacuccaagggcuauaccann

SEQ ID NO: 1633 - RNA, 21 nt, Artificial Sequence
  Description of Artificial Sequence:  siNA sense region
  misc_feature (20)..(21): n is thymidine
agggcuauaccaaguccaunn

SEQ ID NO: 1634 - RNA, 21 nt, Artificial Sequence
  Description of Artificial Sequence:  siNA sense region
  misc_feature (20)..(21): n is thymidine
ggcuauaccaaguccaucgnn

SEQ ID NO: 1635 - RNA, 21 nt, Artificial Sequence
  Description of Artificial Sequence:  siNA sense region
  misc_feature (20)..(21): n is thymidine
cuggagcaguacuaugaccnn

SEQ ID NO: 1636 - RNA, 21 nt, Artificial Sequence
  Description of Artificial Sequence:  siNA sense region
  misc_feature (20)..(21): n is thymidine
cccgccagacuguuagaaann

SEQ ID NO: 1637 - RNA, 21 nt, Artificial Sequence
  Description of Artificial Sequence:  siNA sense region
  misc_feature (20)..(21): n is thymidine
cuguguguggugagcagaann

SEQ ID NO: 1638 - RNA, 21 nt, Artificial Sequence
  Description of Artificial Sequence:  siNA sense region
  misc_feature (20)..(21): n is thymidine
guguggugagcagaaguggnn

SEQ ID NO: 1639 - RNA, 21 nt, Artificial Sequence
  Description of Artificial Sequence:  siNA sense region
  misc_feature (20)..(21): n is thymidine
aguaggucugauguucgaann

SEQ ID NO: 1640 - RNA, 21 nt, Artificial Sequence
  Description of Artificial Sequence:  siNA sense region
  misc_feature (20)..(21): n is thymidine
ugguauagcccuuggaguunn

SEQ ID NO: 1641 - RNA, 21 nt, Artificial Sequence
  Description of Artificial Sequence:  siNA sense region
  misc_feature (20)..(21): n is thymidine
auggacuugguauagcccunn

SEQ ID NO: 1642 - RNA, 21 nt, Artificial Sequence
  Description of Artificial Sequence:  siNA sense region
  misc_feature (20)..(21): n is thymidine
cgauggacuugguauagccnn

SEQ ID NO: 1643 - RNA, 21 nt, Artificial Sequence
  Description of Artificial Sequence:  siNA sense region
  misc_feature (20)..(21): n is thymidine
ggucauaguacugcuccagnn

SEQ ID NO: 1644 - RNA, 21 nt, Artificial Sequence
  Description of Artificial Sequence:  siNA sense region
  misc_feature (20)..(21): n is thymidine
uuucuaacagucuggcgggnn

SEQ ID NO: 1645 - RNA, 21 nt, Artificial Sequence
  Description of Artificial Sequence:  siNA sense region
  misc_feature (20)..(21): n is thymidine
uucugcucaccacacacagnn

SEQ ID NO: 1646 - RNA, 21 nt, Artificial Sequence
  Description of Artificial Sequence:  siNA sense region
  misc_feature (20)..(21): n is thymidine
ccacuucugcucaccacacnn

SEQ ID NO: 1647 - RNA, 21 nt, Artificial Sequence
  Description of Artificial Sequence:  siNA sense region
  misc_feature (1)..(1): 5'-3 attached terminal deoxyabasic moeity
  misc_feature (1)..(3): 2'-deoxy-2'-Fluoro
  misc_feature (7)..(7): 2'-deoxy-2'-Fluoro
  misc_feature (9)..(10): 2'-deoxy-2'-Fluoro
  misc_feature (14)..(16): 2'-deoxy-2'-Fluoro
  misc_feature (18)..(19): 2'-deoxy-2'-Fluoro
  misc_feature (20)..(20): n is thymidine
  misc_feature (21)..(21): 3'-3 attached terminal deoxyabasic moeity
uucgaacaucagaccuacunn

SEQ ID NO: 1648 - RNA, 21 nt, Artificial Sequence
  Description of Artificial Sequence:  siNA sense region
  misc_feature (1)..(1): 5'-3 attached terminal deoxyabasic moeity
  misc_feature (3)..(6): 2'-deoxy-2'-Fluoro
  misc_feature (12)..(13): 2'-deoxy-2'-Fluoro
  misc_feature (15)..(15): 2'-deoxy-2'-Fluoro
  misc_feature (17)..(18): 2'-deoxy-2'-Fluoro
  misc_feature (20)..(20): n is thymidine
  misc_feature (21)..(21): 3'-3 attached terminal deoxyabasic moeity
aacuccaagggcuauaccann

SEQ ID NO: 1649 - RNA, 21 nt, Artificial Sequence
  Description of Artificial Sequence:  siNA sense region
  misc_feature (1)..(1): 5'-3 attached terminal deoxyabasic moeity
  misc_feature (5)..(6): 2'-deoxy-2'-Fluoro
  misc_feature (8)..(8): 2'-deoxy-2'-Fluoro
  misc_feature (10)..(11): 2'-deoxy-2'-Fluoro
  misc_feature (15)..(17): 2'-deoxy-2'-Fluoro
  misc_feature (19)..(19): 2'-deoxy-2'-Fluoro
  misc_feature (20)..(20): n is thymidine
  misc_feature (21)..(21): 3'-3 attached terminal deoxyabasic moeity
agggcuauaccaaguccaunn

SEQ ID NO: 1650 - RNA, 21 nt, Artificial Sequence
  Description of Artificial Sequence:  siNA sense region
  misc_feature (1)..(1): 5'-3 attached terminal deoxyabasic moeity
  misc_feature (3)..(4): 2'-deoxy-2'-Fluoro
  misc_feature (6)..(6): 2'-deoxy-2'-Fluoro
  misc_feature (8)..(9): 2'-deoxy-2'-Fluoro
  misc_feature (13)..(15): 2'-deoxy-2'-Fluoro
  misc_feature (17)..(18): 2'-deoxy-2'-Fluoro
  misc_feature (20)..(20): n is thymidine
  misc_feature (21)..(21): 3'-3 attached terminal deoxyabasic moeity
ggcuauaccaaguccaucgnn

SEQ ID NO: 1651 - RNA, 21 nt, Artificial Sequence
  Description of Artificial Sequence:  siNA sense region
  misc_feature (1)..(1): 5'-3 attached terminal deoxyabasic moeity
  misc_feature (1)..(2): 2'-deoxy-2'-Fluoro
  misc_feature (7)..(7): 2'-deoxy-2'-Fluoro
  misc_feature (10)..(10): 2'-deoxy-2'-Fluoro
  misc_feature (12)..(13): 2'-deoxy-2'-Fluoro
  misc_feature (15)..(15): 2'-deoxy-2'-Fluoro
  misc_feature (18)..(19): 2'-deoxy-2'-Fluoro
  misc_feature (20)..(20): n is thymidine
  misc_feature (21)..(21): 3'-3 attached terminal deoxyabasic moeity
cuggagcaguacuaugaccnn

SEQ ID NO: 1652 - RNA, 21 nt, Artificial Sequence
  Description of Artificial Sequence:  siNA sense region
  misc_feature (1)..(3): 2'-deoxy-2'-Fluoro
  misc_feature (1)..(1): 5'-3 attached terminal deoxyabasic moeity
  misc_feature (5)..(6): 2'-deoxy-2'-Fluoro
  misc_feature (10)..(11): 2'-deoxy-2'-Fluoro
  misc_feature (13)..(14): 2'-deoxy-2'-Fluoro
  misc_feature (20)..(20): n is thymidine
  misc_feature (21)..(21): 3'-3 attached terminal deoxyabasic moeity
cccgccagacuguuagaaann

SEQ ID NO: 1653 - RNA, 21 nt, Artificial Sequence
  Description of Artificial Sequence:  siNA sense region
  misc_feature (1)..(1): 5'-3 attached terminal deoxyabasic moeity
  misc_feature (1)..(2): 2'-deoxy-2'-Fluoro
  misc_feature (4)..(4): 2'-deoxy-2'-Fluoro
  misc_feature (6)..(6): 2'-deoxy-2'-Fluoro
  misc_feature (8)..(8): 2'-deoxy-2'-Fluoro
  misc_feature (11)..(11): 2'-deoxy-2'-Fluoro
  misc_feature (15)..(15): 2'-deoxy-2'-Fluoro
  misc_feature (20)..(20): n is thymidine
  misc_feature (21)..(21): 3'-3 attached terminal deoxyabasic moeity
cuguguguggugagcagaann

SEQ ID NO: 1654 - RNA, 21 nt, Artificial Sequence
  Description of Artificial Sequence:  siNA sense region
  misc_feature (1)..(1): 5'-3 attached terminal deoxyabasic moeity
  misc_feature (2)..(2): 2'-deoxy-2'-Fluoro
  misc_feature (4)..(4): 2'-deoxy-2'-Fluoro
  misc_feature (7)..(7): 2'-deoxy-2'-Fluoro
  misc_feature (11)..(11): 2'-deoxy-2'-Fluoro
  misc_feature (17)..(17): 2'-deoxy-2'-Fluoro
  misc_feature (20)..(20): n is thymidine
  misc_feature (21)..(21): 3'-3 attached terminal deoxyabasic moeity
guguggugagcagaaguggnn

SEQ ID NO: 1655 - RNA, 21 nt, Artificial Sequence
  Description of Artificial Sequence:  siNA sense region
  misc_feature (3)..(3): 2'-deoxy-2'-Fluoro
  misc_feature (7)..(9): 2'-deoxy-2'-Fluoro
  misc_feature (12)..(12): 2'-deoxy-2'-Fluoro
  misc_feature (14)..(16): 2'-deoxy-2'-Fluoro
  misc_feature (20)..(20): Phosphorothioate 3'-Internucleotide Linkage
  misc_feature (21)..(21): n is thymidine
aguaggucugauguucgaann

SEQ ID NO: 1656 - RNA, 21 nt, Artificial Sequence
  Description of Artificial Sequence:  siNA sense region
  misc_feature (1)..(1): 2'-deoxy-2'-Fluoro
  misc_feature (4)..(4): 2'-deoxy-2'-Fluoro
  misc_feature (6)..(6): 2'-deoxy-2'-Fluoro
  misc_feature (9)..(13): 2'-deoxy-2'-Fluoro
  misc_feature (18)..(19): 2'-deoxy-2'-Fluoro
  misc_feature (20)..(20): Phosphorothioate 3'-Internucleotide Linkage
  misc_feature (21)..(21): n is thymidine
ugguauagcccuuggaguunn

SEQ ID NO: 1657 - RNA, 21 nt, Artificial Sequence
  Description of Artificial Sequence:  siNA sense region
  misc_feature (2)..(2): 2'-deoxy-2'-Fluoro
  misc_feature (6)..(8): 2'-deoxy-2'-Fluoro
  misc_feature (11)..(11): 2'-deoxy-2'-Fluoro
  misc_feature (13)..(13): 2'-deoxy-2'-Fluoro
  misc_feature (16)..(19): 2'-deoxy-2'-Fluoro
  misc_feature (20)..(20): Phosphorothioate 3'-Internucleotide Linkage
  misc_feature (21)..(21): n is thymidine
auggacuugguauagcccunn

SEQ ID NO: 1658 - RNA, 21 nt, Artificial Sequence
  Description of Artificial Sequence: siNA sense region
  misc_feature (1)..(1): 2'-deoxy-2'-Fluoro
  misc_feature (4)..(4): 2'-deoxy-2'-Fluoro
  misc_feature (8)..(10): 2'-deoxy-2'-Fluoro
  misc_feature (13)..(13): 2'-deoxy-2'-Fluoro
  misc_feature (15)..(15): 2'-deoxy-2'-Fluoro
  misc_feature (18)..(19): 2'-deoxy-2'-Fluoro
  misc_feature (20)..(20): Phosphorothioate 3'-Internucleotide Linkage
  misc_feature (21)..(21): n is thymidine
cgauggacuugguauagccnn

SEQ ID NO: 1659 - RNA, 21 nt, Artificial Sequence
  Description of Artificial Sequence:  siNA sense region
  misc_feature (3)..(4): 2'-deoxy-2'-Fluoro
  misc_feature (6)..(6): 2'-deoxy-2'-Fluoro
  misc_feature (9)..(9): 2'-deoxy-2'-Fluoro
  misc_feature (11)..(12): 2'-deoxy-2'-Fluoro
  misc_feature (14)..(17): 2'-deoxy-2'-Fluoro
  misc_feature (20)..(20): Phosphorothioate 3'-Internucleotide Linkage
  misc_feature (21)..(21): n is thymidine
ggucauaguacugcuccagnn

SEQ ID NO: 1660 - RNA, 21 nt, Artificial Sequence
  Description of Artificial Sequence:  siNA sense region
  misc_feature (1)..(5): 2'-deoxy-2'-Fluoro
  misc_feature (8)..(8): 2'-deoxy-2'-Fluoro
  misc_feature (11)..(13): 2'-deoxy-2'-Fluoro
  misc_feature (16)..(16): 2'-deoxy-2'-Fluoro
  misc_feature (20)..(20): Phosphorothioate 3'-Internucleotide Linkage
  misc_feature (21)..(21): n is thymidine
uuucuaacagucuggcgggnn

SEQ ID NO: 1661 - RNA, 21 nt, Artificial Sequence
  Description of Artificial Sequence:  siNA sense region
  misc_feature (1)..(4): 2'-deoxy-2'-Fluoro
  misc_feature (6)..(8): 2'-deoxy-2'-Fluoro
  misc_feature (10)..(11): 2'-deoxy-2'-Fluoro
  misc_feature (13)..(13): 2'-deoxy-2'-Fluoro
  misc_feature (15)..(15): 2'-deoxy-2'-Fluoro
  misc_feature (17)..(17): 2'-deoxy-2'-Fluoro
  misc_feature (20)..(20): Phosphorothioate 3'-Internucleotide Linkage
  misc_feature (21)..(21): n is thymidine
uucugcucaccacacacagnn

SEQ ID NO: 1662 - RNA, 21 nt, Artificial Sequence
  Description of Artificial Sequence:  siNA sense region
  misc_feature (1)..(2): 2'-deoxy-2'-Fluoro
  misc_feature (4)..(8): 2'-deoxy-2'-Fluoro
  misc_feature (10)..(12): 2'-deoxy-2'-Fluoro
  misc_feature (14)..(15): 2'-deoxy-2'-Fluoro
  misc_feature (17)..(17): 2'-deoxy-2'-Fluoro
  misc_feature (19)..(19): 2'-deoxy-2'-Fluoro
  misc_feature (20)..(20): Phosphorothioate 3'-Internucleotide Linkage
  misc_feature (21)..(21): n is thymidine
ccacuucugcucaccacacnn

SEQ ID NO: 1663 - RNA, 21 nt, Artificial Sequence
  Description of Artificial Sequence:  siNA sense region
  misc_feature (1)..(3): 2'-deoxy-2'-Fluoro
  misc_feature (1)..(1): 5'-3 attached terminal deoxyabasic moeity
  misc_feature (4)..(6): deoxy
  misc_feature (7)..(7): 2'-deoxy-2'-Fluoro
  misc_feature (8)..(8): deoxy
  misc_feature (9)..(10): 2'-deoxy-2'-Fluoro
  misc_feature (11)..(13): deoxy
  misc_feature (14)..(16): 2'-deoxy-2'-Fluoro
  misc_feature (17)..(17): deoxy
  misc_feature (18)..(19): 2'-deoxy-2'-Fluoro
  misc_feature (20)..(20): n is thymidine
  misc_feature (21)..(21): 3'-3 attached terminal deoxyabasic moeity
uucgaacaucagaccuacunn

SEQ ID NO: 1664 - RNA, 21 nt, Artificial Sequence
  Description of Artificial Sequence:  siNA sense region
  misc_feature (1)..(1): 5'-3 attached terminal deoxyabasic moeity
  misc_feature (1)..(2): deoxy
  misc_feature (3)..(6): 2'-deoxy-2'-Fluoro
  misc_feature (7)..(11): deoxy
  misc_feature (12)..(13): 2'-deoxy-2'-Fluoro
  misc_feature (14)..(14): deoxy
  misc_feature (15)..(15): 2'-deoxy-2'-Fluoro
  misc_feature (16)..(16): deoxy
  misc_feature (17)..(18): 2'-deoxy-2'-Fluoro
  misc_feature (19)..(19): deoxy
  misc_feature (20)..(20): n is thymidine
  misc_feature (21)..(21): 3'-3 attached terminal deoxyabasic moeity
aacuccaagggcuauaccann

SEQ ID NO: 1665 - RNA, 21 nt, Artificial Sequence
  Description of Artificial Sequence:  siNA sense region
  misc_feature (1)..(4): deoxy
  misc_feature (1)..(1): 5'-3 attached terminal deoxyabasic moeity
  misc_feature (5)..(6): 2'-deoxy-2'-Fluoro
  misc_feature (7)..(7): deoxy
  misc_feature (8)..(8): 2'-deoxy-2'-Fluoro
  misc_feature (9)..(9): deoxy
  misc_feature (10)..(11): 2'-deoxy-2'-Fluoro
  misc_feature (12)..(14): deoxy
  misc_feature (15)..(17): 2'-deoxy-2'-Fluoro
  misc_feature (18)..(18): deoxy
  misc_feature (19)..(19): 2'-deoxy-2'-Fluoro
  misc_feature (20)..(20): n is thymidine
  misc_feature (21)..(21): 3'-3 attached terminal deoxyabasic moeity
agggcuauaccaaguccaunn

SEQ ID NO: 1666 - RNA, 21 nt, Artificial Sequence
  Description of Artificial Sequence:  siNA sense region
  misc_feature (1)..(1): 5'-3 attached terminal deoxyabasic moeity
  misc_feature (1)..(2): deoxy
  misc_feature (3)..(4): 2'-deoxy-2'-Fluoro
  misc_feature (5)..(5): deoxy
  misc_feature (6)..(6): 2'-deoxy-2'-Fluoro
  misc_feature (7)..(7): deoxy
  misc_feature (8)..(9): 2'-deoxy-2'-Fluoro
  misc_feature (10)..(12): deoxy
  misc_feature (13)..(15): 2'-deoxy-2'-Fluoro
  misc_feature (16)..(16): deoxy
  misc_feature (17)..(18): 2'-deoxy-2'-Fluoro
  misc_feature (19)..(19): deoxy
  misc_feature (20)..(20): n is thymidine
  misc_feature (21)..(21): 3'-3 attached terminal deoxyabasic moeity
ggcuauaccaaguccaucgnn

SEQ ID NO: 1667 - RNA, 21 nt, Artificial Sequence
  Description of Artificial Sequence:  siNA sense region
  misc_feature (1)..(2): 2'-deoxy-2'-Fluoro
  misc_feature (1)..(1): 5'-3 attached terminal deoxyabasic moeity
  misc_feature (3)..(6): deoxy
  misc_feature (7)..(7): 2'-deoxy-2'-Fluoro
  misc_feature (8)..(9): deoxy
  misc_feature (10)..(10): 2'-deoxy-2'-Fluoro
  misc_feature (11)..(11): deoxy
  misc_feature (12)..(13): 2'-deoxy-2'-Fluoro
  misc_feature (14)..(14): deoxy
  misc_feature (15)..(15): 2'-deoxy-2'-Fluoro
  misc_feature (16)..(17): deoxy
  misc_feature (18)..(19): 2'-deoxy-2'-Fluoro
  misc_feature (20)..(20): n is thymidine
  misc_feature (21)..(21): 3'-3 attached terminal deoxyabasic moeity
cuggagcaguacuaugaccnn

SEQ ID NO: 1668 - RNA, 21 nt, Artificial Sequence
  Description of Artificial Sequence:  siNA sense region
  misc_feature (1)..(1): 5'-3 attached terminal deoxyabasic moeity
  misc_feature (1)..(3): 2'-deoxy-2'-Fluoro
  misc_feature (4)..(4): deoxy
  misc_feature (5)..(6): 2'-deoxy-2'-Fluoro
  misc_feature (7)..(9): deoxy
  misc_feature (10)..(11): 2'-deoxy-2'-Fluoro
  misc_feature (12)..(12): deoxy
  misc_feature (13)..(14): 2'-deoxy-2'-Fluoro
  misc_feature (15)..(19): deoxy
  misc_feature (20)..(20): n is thymidine
  misc_feature (21)..(21): 3'-3 attached terminal deoxyabasic moeity
cccgccagacuguuagaaann

SEQ ID NO: 1669 - RNA, 21 nt, Artificial Sequence
  Description of Artificial Sequence:  siNA sense region
  misc_feature (1)..(2): 2'-deoxy-2'-Fluoro
  misc_feature (1)..(1): 5'-3 attached terminal deoxyabasic moeity
  misc_feature (3)..(3): deoxy
  misc_feature (4)..(4): 2'-deoxy-2'-Fluoro
  misc_feature (5)..(5): deoxy
  misc_feature (6)..(6): 2'-deoxy-2'-Fluoro
  misc_feature (7)..(7): deoxy
  misc_feature (8)..(8): 2'-deoxy-2'-Fluoro
  misc_feature (9)..(10): deoxy
  misc_feature (11)..(11): 2'-deoxy-2'-Fluoro
  misc_feature (12)..(14): deoxy
  misc_feature (15)..(15): 2'-deoxy-2'-Fluoro
  misc_feature (16)..(19): deoxy
  misc_feature (20)..(20): n is thymidine
  misc_feature (21)..(21): 3'-3 attached terminal deoxyabasic moeity
cuguguguggugagcagaann

SEQ ID NO: 1670 - RNA, 21 nt, Artificial Sequence
  Description of Artificial Sequence:  siNA sense region
  misc_feature (1)..(1): 5'-3 attached terminal deoxyabasic moeity
  misc_feature (1)..(1): deoxy
  misc_feature (2)..(2): 2'-deoxy-2'-Fluoro
  misc_feature (3)..(3): deoxy
  misc_feature (4)..(4): 2'-deoxy-2'-Fluoro
  misc_feature (5)..(6): deoxy
  misc_feature (7)..(7): 2'-deoxy-2'-Fluoro
  misc_feature (8)..(10): deoxy
  misc_feature (11)..(11): 2'-deoxy-2'-Fluoro
  misc_feature (12)..(16): deoxy
  misc_feature (17)..(17): 2'-deoxy-2'-Fluoro
  misc_feature (18)..(19): deoxy
  misc_feature (20)..(20): n is thymidine
  misc_feature (21)..(21): 3'-3 attached terminal deoxyabasic moeity
guguggugagcagaaguggnn

SEQ ID NO: 1671 - RNA, 21 nt, Artificial Sequence
  Description of Artificial Sequence:  siNA sense region
  misc_feature (1)..(2): deoxy
  misc_feature (3)..(3): 2'-deoxy-2'-Fluoro
  misc_feature (4)..(6): deoxy
  misc_feature (7)..(9): 2'-deoxy-2'-Fluoro
  misc_feature (10)..(11): deoxy
  misc_feature (12)..(12): 2'-deoxy-2'-Fluoro
  misc_feature (13)..(13): deoxy
  misc_feature (14)..(16): 2'-deoxy-2'-Fluoro
  misc_feature (17)..(19): deoxy
  misc_feature (20)..(20): Phosphorothioate 3'-Internucleotide Linkage
  misc_feature (21)..(21): n is thymidine
aguaggucugauguucgaann

SEQ ID NO: 1672 - RNA, 21 nt, Artificial Sequence
  Description of Artificial Sequence:  siNA sense region
  misc_feature (1)..(1): 2'-deoxy-2'-Fluoro
  misc_feature (2)..(3): deoxy
  misc_feature (4)..(4): 2'-deoxy-2'-Fluoro
  misc_feature (5)..(5): deoxy
  misc_feature (6)..(6): 2'-deoxy-2'-Fluoro
  misc_feature (7)..(8): deoxy
  misc_feature (9)..(13): 2'-deoxy-2'-Fluoro
  misc_feature (14)..(17): deoxy
  misc_feature (18)..(19): 2'-deoxy-2'-Fluoro
  misc_feature (20)..(20): Phosphorothioate 3'-Internucleotide Linkage
  misc_feature (21)..(21): n is thymidine
ugguauagcccuuggaguunn

SEQ ID NO: 1673 - RNA, 21 nt, Artificial Sequence
  Description of Artificial Sequence:  siNA sense region
  misc_feature (1)..(1): deoxy
  misc_feature (2)..(2): 2'-deoxy-2'-Fluoro
  misc_feature (3)..(5): deoxy
  misc_feature (6)..(8): 2'-deoxy-2'-Fluoro
  misc_feature (9)..(10): deoxy
  misc_feature (11)..(11): 2'-deoxy-2'-Fluoro
  misc_feature (12)..(12): deoxy
  misc_feature (13)..(13): 2'-deoxy-2'-Fluoro
  misc_feature (14)..(15): deoxy
  misc_feature (16)..(19): 2'-deoxy-2'-Fluoro
  misc_feature (20)..(20): Phosphorothioate 3'-Internucleotide Linkage
  misc_feature (21)..(21): n is thymidine
auggacuugguauagcccunn

SEQ ID NO: 1674 - RNA, 21 nt, Artificial Sequence
  Description of Artificial Sequence:  siNA sense region
  misc_feature (1)..(1): 2'-deoxy-2'-Fluoro
  misc_feature (2)..(3): deoxy
  misc_feature (4)..(4): 2'-deoxy-2'-Fluoro
  misc_feature (5)..(7): deoxy
  misc_feature (8)..(10): 2'-deoxy-2'-Fluoro
  misc_feature (11)..(12): deoxy
  misc_feature (13)..(13): 2'-deoxy-2'-Fluoro
  misc_feature (14)..(14): deoxy
  misc_feature (15)..(15): 2'-deoxy-2'-Fluoro
  misc_feature (16)..(17): deoxy
  misc_feature (18)..(19): 2'-deoxy-2'-Fluoro
  misc_feature (20)..(20): Phosphorothioate 3'-Internucleotide Linkage
  misc_feature (21)..(21): n is thymidine
cgauggacuugguauagccnn

SEQ ID NO: 1675 - RNA, 21 nt, Artificial Sequence
  Description of Artificial Sequence:  siNA sense region
  misc_feature (1)..(2): deoxy
  misc_feature (3)..(4): 2'-deoxy-2'-Fluoro
  misc_feature (5)..(5): deoxy
  misc_feature (6)..(6): 2'-deoxy-2'-Fluoro
  misc_feature (7)..(8): deoxy
  misc_feature (9)..(9): 2'-deoxy-2'-Fluoro
  misc_feature (10)..(10): deoxy
  misc_feature (11)..(12): 2'-deoxy-2'-Fluoro
  misc_feature (13)..(13): deoxy
  misc_feature (14)..(17): 2'-deoxy-2'-Fluoro
  misc_feature (18)..(19): deoxy
  misc_feature (20)..(20): Phosphorothioate 3'-Internucleotide Linkage
  misc_feature (21)..(21): n is thymidine
ggucauaguacugcuccagnn

SEQ ID NO: 1676 - RNA, 21 nt, Artificial Sequence
  Description of Artificial Sequence:  siNA sense region
  misc_feature (1)..(5): 2'-deoxy-2'-Fluoro
  misc_feature (6)..(7): deoxy
  misc_feature (8)..(8): 2'-deoxy-2'-Fluoro
  misc_feature (9)..(10): deoxy
  misc_feature (11)..(13): 2'-deoxy-2'-Fluoro
  misc_feature (14)..(15): deoxy
  misc_feature (16)..(16): 2'-deoxy-2'-Fluoro
  misc_feature (17)..(19): deoxy
  misc_feature (20)..(20): Phosphorothioate 3'-Internucleotide Linkage
  misc_feature (21)..(21): n is thymidine
uuucuaacagucuggcgggnn

SEQ ID NO: 1677 - RNA, 21 nt, Artificial Sequence
  Description of Artificial Sequence:  siNA sense region
  misc_feature (1)..(4): 2'-deoxy-2'-Fluoro
  misc_feature (5)..(5): deoxy
  misc_feature (6)..(8): 2'-deoxy-2'-Fluoro
  misc_feature (9)..(9): deoxy
  misc_feature (10)..(11): 2'-deoxy-2'-Fluoro
  misc_feature (12)..(12): deoxy
  misc_feature (13)..(13): 2'-deoxy-2'-Fluoro
  misc_feature (14)..(14): deoxy
  misc_feature (15)..(15): 2'-deoxy-2'-Fluoro
  misc_feature (16)..(16): deoxy
  misc_feature (17)..(17): 2'-deoxy-2'-Fluoro
  misc_feature (18)..(19): deoxy
  misc_feature (20)..(20): Phosphorothioate 3'-Internucleotide Linkage
  misc_feature (20)..(20)
  misc_feature (21)..(21): n is thymidine
uucugcucaccacacacagnn

SEQ ID NO: 1678 - RNA, 21 nt, Artificial Sequence
  Description of Artificial Sequence:  siNA sense region
  misc_feature (1)..(2): 2'-deoxy-2'-Fluoro
  misc_feature (3)..(3): deoxy
  misc_feature (4)..(8): 2'-deoxy-2'-Fluoro
  misc_feature (9)..(9): deoxy
  misc_feature (10)..(12): 2'-deoxy-2'-Fluoro
  misc_feature (13)..(13): deoxy
  misc_feature (14)..(15): 2'-deoxy-2'-Fluoro
  misc_feature (16)..(16): deoxy
  misc_feature (17)..(17): 2'-deoxy-2'-Fluoro
  misc_feature (18)..(18): deoxy
  misc_feature (19)..(19): 2'-deoxy-2'-Fluoro
  misc_feature (20)..(20): Phosphorothioate 3'-Internucleotide Linkage
  misc_feature (21)..(21): n is thymidine
ccacuucugcucaccacacnn

SEQ ID NO: 1679 - RNA, 21 nt, Artificial Sequence
  Description of Artificial Sequence:  siNA sense region
  misc_feature (1)..(3): 2'-deoxy-2'-Fluoro
  misc_feature (1)..(1): 5'-3 attached terminal deoxyabasic moeity
  misc_feature (4)..(6): 2'-O-methyl
  misc_feature (7)..(7): 2'-deoxy-2'-Fluoro
  misc_feature (8)..(8): 2'-O-methyl
  misc_feature (9)..(10): 2'-deoxy-2'-Fluoro
  misc_feature (11)..(13): 2'-O-methyl
  misc_feature (14)..(16): 2'-deoxy-2'-Fluoro
  misc_feature (17)..(17): 2'-O-methyl
  misc_feature (18)..(19): 2'-deoxy-2'-Fluoro
  misc_feature (20)..(20): n is thymidine
  misc_feature (21)..(21): 3'-3 attached terminal deoxyabasic moeity
uucgaacaucagaccuacunn

SEQ ID NO: 1680 - RNA, 21 nt, Artificial Sequence
  Description of Artificial Sequence:  siNA sense region
  misc_feature (1)..(1): 5'-3 attached terminal deoxyabasic moeity
  misc_feature (1)..(2): 2'-O-methyl
  misc_feature (3)..(6): 2'-deoxy-2'-Fluoro
  misc_feature (7)..(11): 2'-O-methyl
  misc_feature (12)..(13): 2'-deoxy-2'-Fluoro
  misc_feature (14)..(14): 2'-O-methyl
  misc_feature (15)..(15): 2'-deoxy-2'-Fluoro
  misc_feature (16)..(16): 2'-O-methyl
  misc_feature (17)..(18): 2'-deoxy-2'-Fluoro
  misc_feature (19)..(19): 2'-O-methyl
  misc_feature (20)..(20): n is thymidine
  misc_feature (21)..(21): 3'-3 attached terminal deoxyabasic moeity
aacuccaagggcuauaccann

SEQ ID NO: 1681 - RNA, 21 nt, Artificial Sequence
  Description of Artificial Sequence:  siNA sense region
  misc_feature (1)..(4): 2'-O-methyl
  misc_feature (1)..(1): 5'-3 attached terminal deoxyabasic moeity
  misc_feature (5)..(6): 2'-deoxy-2'-Fluoro
  misc_feature (7)..(7): 2'-O-methyl
  misc_feature (8)..(8): 2'-deoxy-2'-Fluoro
  misc_feature (9)..(9): 2'-O-methyl
  misc_feature (10)..(11): 2'-deoxy-2'-Fluoro
  misc_feature (12)..(14): 2'-O-methyl
  misc_feature (15)..(17): 2'-deoxy-2'-Fluoro
  misc_feature (18)..(18): 2'-O-methyl
  misc_feature (19)..(19): 2'-deoxy-2'-Fluoro
  misc_feature (20)..(20): n is thymidine
  misc_feature (21)..(21): 3'-3 attached terminal deoxyabasic moeity
agggcuauaccaaguccaunn

SEQ ID NO: 1682 - RNA, 21 nt, Artificial Sequence
  Description of Artificial Sequence:  siNA sense region
  misc_feature (1)..(1): 5'-3 attached terminal deoxyabasic moeity
  misc_feature (1)..(2): 2'-O-methyl
  misc_feature (3)..(4): 2'-deoxy-2'-Fluoro
  misc_feature (5)..(5): 2'-O-methyl
  misc_feature (6)..(6): 2'-deoxy-2'-Fluoro
  misc_feature (7)..(7): 2'-O-methyl
  misc_feature (8)..(9): 2'-deoxy-2'-Fluoro
  misc_feature (10)..(12): 2'-O-methyl
  misc_feature (13)..(15): 2'-deoxy-2'-Fluoro
  misc_feature (16)..(16): 2'-O-methyl
  misc_feature (17)..(18): 2'-deoxy-2'-Fluoro
  misc_feature (19)..(19): 2'-O-methyl
  misc_feature (20)..(20): n is thymidine
  misc_feature (21)..(21): 3'-3 attached terminal deoxyabasic moeity
ggcuauaccaaguccaucgnn

SEQ ID NO: 1683 - RNA, 21 nt, Artificial Sequence
  Description of Artificial Sequence:  siNA sense region
  misc_feature (1)..(2): 2'-deoxy-2'-Fluoro
  misc_feature (1)..(1): 5'-3 attached terminal deoxyabasic moeity
  misc_feature (3)..(6): 2'-O-methyl
  misc_feature (7)..(7): 2'-deoxy-2'-Fluoro
  misc_feature (8)..(9): 2'-O-methyl
  misc_feature (10)..(10): 2'-deoxy-2'-Fluoro
  misc_feature (11)..(11): 2'-O-methyl
  misc_feature (12)..(13): 2'-deoxy-2'-Fluoro
  misc_feature (14)..(14): 2'-O-methyl
  misc_feature (15)..(15): 2'-deoxy-2'-Fluoro
  misc_feature (16)..(17): 2'-O-methyl
  misc_feature (18)..(19): 2'-deoxy-2'-Fluoro
  misc_feature (20)..(20): n is thymidine
  misc_feature (21)..(21): 3'-3 attached terminal deoxyabasic moeity
cuggagcaguacuaugaccnn

SEQ ID NO: 1684 - RNA, 21 nt, Artificial Sequence
  Description of Artificial Sequence:  siNA sense region
  misc_feature (1)..(1): 5'-3 attached terminal deoxyabasic moeity
  misc_feature (1)..(3): 2'-deoxy-2'-Fluoro
  misc_feature (4)..(4): 2'-O-methyl
  misc_feature (5)..(6): 2'-deoxy-2'-Fluoro
  misc_feature (7)..(9): 2'-O-methyl
  misc_feature (10)..(11): 2'-deoxy-2'-Fluoro
  misc_feature (12)..(12): 2'-O-methyl
  misc_feature (13)..(14): 2'-deoxy-2'-Fluoro
  misc_feature (15)..(19): 2'-O-methyl
  misc_feature (20)..(20): n is thymidine
  misc_feature (21)..(21): 3'-3 attached terminal deoxyabasic moeity
cccgccagacuguuagaaann

SEQ ID NO: 1685 - RNA, 21 nt, Artificial Sequence
  Description of Artificial Sequence:  siNA sense region
  misc_feature (1)..(2): 2'-deoxy-2'-Fluoro
  misc_feature (1)..(1): 5'-3 attached terminal deoxyabasic moeity
  misc_feature (3)..(3): 2'-O-methyl
  misc_feature (4)..(4): 2'-deoxy-2'-Fluoro
  misc_feature (5)..(5): 2'-O-methyl
  misc_feature (6)..(6): 2'-deoxy-2'-Fluoro
  misc_feature (7)..(7): 2'-O-methyl
  misc_feature (8)..(8): 2'-deoxy-2'-Fluoro
  misc_feature (9)..(10): 2'-O-methyl
  misc_feature (11)..(11): 2'-deoxy-2'-Fluoro
  misc_feature (12)..(14): 2'-O-methyl
  misc_feature (15)..(15): 2'-deoxy-2'-Fluoro
  misc_feature (16)..(19): 2'-O-methyl
  misc_feature (20)..(20): n is thymidine
  misc_feature (21)..(21): 3'-3 attached terminal deoxyabasic moeity
cuguguguggugagcagaann

SEQ ID NO: 1686 - RNA, 21 nt, Artificial Sequence
  Description of Artificial Sequence:  siNA sense region
  misc_feature (1)..(1): 5'-3 attached terminal deoxyabasic moeity
  misc_feature (1)..(1): 2'-O-methyl
  misc_feature (2)..(2): 2'-deoxy-2'-Fluoro
  misc_feature (3)..(3): 2'-O-methyl
  misc_feature (4)..(4): 2'-deoxy-2'-Fluoro
  misc_feature (5)..(6): 2'-O-methyl
  misc_feature (7)..(7): 2'-deoxy-2'-Fluoro
  misc_feature (8)..(10): 2'-O-methyl
  misc_feature (11)..(11): 2'-deoxy-2'-Fluoro
  misc_feature (12)..(16): 2'-O-methyl
  misc_feature (17)..(17): 2'-deoxy-2'-Fluoro
  misc_feature (18)..(19): 2'-O-methyl
  misc_feature (20)..(20): n is thymidine
  misc_feature (21)..(21): 3'-3 attached terminal deoxyabasic moeity
guguggugagcagaaguggnn

SEQ ID NO: 1687 - RNA, 21 nt, Artificial Sequence
  Description of Artificial Sequence:  siNA sense region
  misc_feature (1)..(2): 2'-O-methyl
  misc_feature (3)..(3): 2'-deoxy-2'-Fluoro
  misc_feature (4)..(6): 2'-O-methyl
  misc_feature (7)..(9): 2'-deoxy-2'-Fluoro
  misc_feature (10)..(11): 2'-O-methyl
  misc_feature (12)..(12): 2'-deoxy-2'-Fluoro
  misc_feature (13)..(13): 2'-O-methyl
  misc_feature (14)..(16): 2'-deoxy-2'-Fluoro
  misc_feature (17)..(19): 2'-O-methyl
  misc_feature (20)..(20): Phosphorothioate 3'-Internucleotide Linkage
  misc_feature (21)..(21): n is thymidine
aguaggucugauguucgaann

SEQ ID NO: 1688 - RNA, 21 nt, Artificial Sequence
  Description of Artificial Sequence:  siNA sense region
  misc_feature (1)..(1): 2'-deoxy-2'-Fluoro
  misc_feature (2)..(3): 2'-O-methyl
  misc_feature (4)..(4): 2'-deoxy-2'-Fluoro
  misc_feature (5)..(5): 2'-O-methyl
  misc_feature (6)..(6): 2'-deoxy-2'-Fluoro
  misc_feature (7)..(8): 2'-O-methyl
  misc_feature (9)..(13): 2'-deoxy-2'-Fluoro
  misc_feature (14)..(17): 2'-O-methyl
  misc_feature (18)..(19): 2'-deoxy-2'-Fluoro
  misc_feature (20)..(20): Phosphorothioate 3'-Internucleotide Linkage
  misc_feature (21)..(21): n is thymidine
ugguauagcccuuggaguunn

SEQ ID NO: 1689 - RNA, 21 nt, Artificial Sequence
  Description of Artificial Sequence:  siNA sense region
  misc_feature (1)..(1): 2'-O-methyl
  misc_feature (2)..(2): 2'-deoxy-2'-Fluoro
  misc_feature (3)..(5): 2'-O-methyl
  misc_feature (6)..(8): 2'-deoxy-2'-Fluoro
  misc_feature (9)..(10): 2'-O-methyl
  misc_feature (11)..(11): 2'-deoxy-2'-Fluoro
  misc_feature (12)..(12): 2'-O-methyl
  misc_feature (13)..(13): 2'-deoxy-2'-Fluoro
  misc_feature (14)..(15): 2'-O-methyl
  misc_feature (16)..(19): 2'-deoxy-2'-Fluoro
  misc_feature (20)..(20): Phosphorothioate 3'-Internucleotide Linkage
  misc_feature (21)..(21): n is thymidine
auggacuugguauagcccunn

SEQ ID NO: 1690 - RNA, 21 nt, Artificial Sequence
  Description of Artificial Sequence:  siNA sense region
  misc_feature (1)..(1): 2'-deoxy-2'-Fluoro
  misc_feature (2)..(3): 2'-O-methyl
  misc_feature (4)..(4): 2'-deoxy-2'-Fluoro
  misc_feature (4)..(7): 2'-O-methyl
  misc_feature (8)..(10): 2'-deoxy-2'-Fluoro
  misc_feature (11)..(12): 2'-O-methyl
  misc_feature (13)..(13): 2'-deoxy-2'-Fluoro
  misc_feature (14)..(14): 2'-O-methyl
  misc_feature (15)..(15): 2'-deoxy-2'-Fluoro
  misc_feature (16)..(17): 2'-O-methyl
  misc_feature (18)..(19): 2'-deoxy-2'-Fluoro
  misc_feature (20)..(20): Phosphorothioate 3'-Internucleotide Linkage
  misc_feature (21)..(21): n is thymidine
cgauggacuugguauagccnn

SEQ ID NO: 1691 - RNA, 21 nt, Artificial Sequence
  Description of Artificial Sequence:  siNA sense region
  misc_feature (1)..(2): 2'-O-methyl
  misc_feature (3)..(4): 2'-deoxy-2'-Fluoro
  misc_feature (5)..(5): 2'-O-methyl
  misc_feature (6)..(6): 2'-deoxy-2'-Fluoro
  misc_feature (7)..(8): 2'-O-methyl
  misc_feature (9)..(9): 2'-deoxy-2'-Fluoro
  misc_feature (10)..(10): 2'-O-methyl
  misc_feature (11)..(12): 2'-deoxy-2'-Fluoro
  misc_feature (13)..(13): 2'-O-methyl
  misc_feature (14)..(17): 2'-deoxy-2'-Fluoro
  misc_feature (18)..(19): 2'-O-methyl
  misc_feature (20)..(20): Phosphorothioate 3'-Internucleotide Linkage
  misc_feature (21)..(21): n is thymidine
ggucauaguacugcuccagnn

SEQ ID NO: 1692 - RNA, 21 nt, Artificial Sequence
  Description of Artificial Sequence:  siNA sense region
  misc_feature (1)..(5): 2'-deoxy-2'-Fluoro
  misc_feature (6)..(7): 2'-O-methyl
  misc_feature (8)..(8): 2'-deoxy-2'-Fluoro
  misc_feature (9)..(10): 2'-O-methyl
  misc_feature (11)..(13): 2'-deoxy-2'-Fluoro
  misc_feature (14)..(15): 2'-O-methyl
  misc_feature (16)..(16): 2'-deoxy-2'-Fluoro
  misc_feature (17)..(19): 2'-O-methyl
  misc_feature (20)..(20): Phosphorothioate 3'-Internucleotide Linkage
  misc_feature (21)..(21): n is thymidine
uuucuaacagucuggcgggnn

SEQ ID NO: 1693 - RNA, 21 nt, Artificial Sequence
  Description of Artificial Sequence:  siNA sense region
  misc_feature (1)..(4): 2'-deoxy-2'-Fluoro
  misc_feature (5)..(5): 2'-O-methyl
  misc_feature (6)..(8): 2'-deoxy-2'-Fluoro
  misc_feature (9)..(9): 2'-O-methyl
  misc_feature (10)..(11): 2'-deoxy-2'-Fluoro
  misc_feature (12)..(12): 2'-O-methyl
  misc_feature (13)..(13): 2'-deoxy-2'-Fluoro
  misc_feature (14)..(14): 2'-O-methyl
  misc_feature (15)..(15): 2'-deoxy-2'-Fluoro
  misc_feature (16)..(16): 2'-O-methyl
  misc_feature (17)..(17): 2'-deoxy-2'-Fluoro
  misc_feature (18)..(19): 2'-O-methyl
  misc_feature (20)..(20): Phosphorothioate 3'-Internucleotide Linkage
  misc_feature (21)..(21): n is thymidine
uucugcucaccacacacagnn

SEQ ID NO: 1694 - RNA, 21 nt, Artificial Sequence
  Description of Artificial Sequence:  siNA sense region
  misc_feature (1)..(2): 2'-deoxy-2'-Fluoro
  misc_feature (3)..(3): 2'-O-methyl
  misc_feature (4)..(8): 2'-deoxy-2'-Fluoro
  misc_feature (9)..(9): 2'-O-methyl
  misc_feature (10)..(12): 2'-deoxy-2'-Fluoro
  misc_feature (13)..(13): 2'-O-methyl
  misc_feature (14)..(15): 2'-deoxy-2'-Fluoro
  misc_feature (16)..(16): 2'-O-methyl
  misc_feature (17)..(17): 2'-deoxy-2'-Fluoro
  misc_feature (18)..(18): 2'-O-methyl
  misc_feature (19)..(19): 2'-deoxy-2'-Fluoro
  misc_feature (20)..(20): Phosphorothioate 3'-Internucleotide Linkage
  misc_feature (21)..(21): n is thymidine
ccacuucugcucaccacacnn

SEQ ID NO: 1695 - RNA, 21 nt, Artificial Sequence
  Description of Artificial Sequence:  siNA sense region
  misc_feature (1)..(1): 5'-3 attached terminal deoxyabasic moeity
  misc_feature (20)..(20): n is thymidine
  misc_feature (21)..(21): 3'-3 attached terminal deoxyabasic moeity
uucgaacaucagaccuacunn

SEQ ID NO: 1696 - RNA, 21 nt, Artificial Sequence
  Description of Artificial Sequence:  siNA sense region
  misc_feature (1)..(1): 5'-3 attached terminal deoxyabasic moeity
  misc_feature (20)..(20): n is thymidine
  misc_feature (21)..(21): 3'-3 attached terminal deoxyabasic moeity
aacuccaagggcuauaccann

SEQ ID NO: 1697 - RNA, 21 nt, Artificial Sequence
  Description of Artificial Sequence:  siNA sense region
  misc_feature (1)..(1): 5'-3 attached terminal deoxyabasic moeity
  misc_feature (20)..(20): n is thymidine
  misc_feature (21)..(21): 3'-3 attached terminal deoxyabasic moeity
agggcuauaccaaguccaunn

SEQ ID NO: 1698 - RNA, 21 nt, Artificial Sequence
  Description of Artificial Sequence:  siNA sense region
  misc_feature (1)..(1): 5'-3 attached terminal deoxyabasic moeity
  misc_feature (20)..(20): n is thymidine
  misc_feature (21)..(21): 3'-3 attached terminal deoxyabasic moeity
ggcuauaccaaguccaucgnn

SEQ ID NO: 1699 - RNA, 21 nt, Artificial Sequence
  Description of Artificial Sequence:  siNA sense region
  misc_feature (1)..(1): 5'-3 attached terminal deoxyabasic moeity
  misc_feature (20)..(20): n is thymidine
  misc_feature (21)..(21): 3'-3 attached terminal deoxyabasic moeity
cuggagcaguacuaugaccnn

SEQ ID NO: 1700 - RNA, 21 nt, Artificial Sequence
  Description of Artificial Sequence:  siNA sense region
  misc_feature (1)..(1): 5'-3 attached terminal deoxyabasic moeity
  misc_feature (20)..(20): n is thymidine
  misc_feature (21)..(21): 3'-3 attached terminal deoxyabasic moeity
cccgccagacuguuagaaann

SEQ ID NO: 1701 - RNA, 21 nt, Artificial Sequence
  Description of Artificial Sequence:  siNA sense region
  misc_feature (1)..(1): 5'-3 attached terminal deoxyabasic moeity
  misc_feature (20)..(20): n is thymidine
  misc_feature (21)..(21): 3'-3 attached terminal deoxyabasic moeity
cuguguguggugagcagaann

SEQ ID NO: 1702 - RNA, 21 nt, Artificial Sequence
  Description of Artificial Sequence:  siNA sense region
  misc_feature (1)..(1): 5'-3 attached terminal deoxyabasic moeity
  misc_feature (20)..(20): n is thymidine
  misc_feature (21)..(21): 3'-3 attached terminal deoxyabasic moeity
guguggugagcagaaguggnn

SEQ ID NO: 1703 - RNA, 21 nt, Artificial Sequence
  Description of Artificial Sequence:  siNA sense region
  misc_feature (20)..(20): Phosphorothioate 3'-Internucleotide Linkage
  misc_feature (21)..(21): n is thymidine
aguaggucugauguucgaann

SEQ ID NO: 1704 - RNA, 21 nt, Artificial Sequence
  Description of Artificial Sequence:  siNA sense region
  misc_feature (20)..(20): Phosphorothioate 3'-Internucleotide Linkage
  misc_feature (21)..(21): n is thymidine
ugguauagcccuuggaguunn

SEQ ID NO: 1705 - RNA, 21 nt, Artificial Sequence
  Description of Artificial Sequence:  siNA sense region
  misc_feature (20)..(20): Phosphorothioate 3'-Internucleotide Linkage
  misc_feature (21)..(21): n is thymidine
auggacuugguauagcccunn

SEQ ID NO: 1706 - RNA, 21 nt, Artificial Sequence
  Description of Artificial Sequence:  siNA sense region
  misc_feature (20)..(20): Phosphorothioate 3'-Internucleotide Linkage
  misc_feature (21)..(21): n is thymidine
cgauggacuugguauagccnn

SEQ ID NO: 1707 - RNA, 21 nt, Artificial Sequence
  Description of Artificial Sequence:  siNA sense region
  misc_feature (20)..(20): Phosphorothioate 3'-Internucleotide Linkage
  misc_feature (21)..(21): n is thymidine
ggucauaguacugcuccagnn

SEQ ID NO: 1708 - RNA, 21 nt, Artificial Sequence
  Description of Artificial Sequence:  siNA sense region
  misc_feature (20)..(20): Phosphorothioate 3'-Internucleotide Linkage
  misc_feature (21)..(21): n is thymidine
uuucuaacagucuggcgggnn

SEQ ID NO: 1709 - RNA, 21 nt, Artificial Sequence
  Description of Artificial Sequence:  siNA sense region
  misc_feature (20)..(20): Phosphorothioate 3'-Internucleotide Linkage
  misc_feature (21)..(21): n is thymidine
uucugcucaccacacacagnn

SEQ ID NO: 1710 - RNA, 21 nt, Artificial Sequence
  Description of Artificial Sequence:  siNA sense region
  misc_feature (20)..(20): Phosphorothioate 3'-Internucleotide Linkage
  misc_feature (21)..(21): n is thymidine
ccacuucugcucaccacacnn

SEQ ID NO: 1711 - RNA, 21 nt, Artificial Sequence
  Description of Artificial Sequence:  siNA sense region
  misc_feature (1)..(2): 2'-O-methyl
  misc_feature (3)..(3): 2'-deoxy-2'-Fluoro
  misc_feature (4)..(6): 2'-O-methyl
  misc_feature (7)..(9): 2'-deoxy-2'-Fluoro
  misc_feature (10)..(11): 2'-O-methyl
  misc_feature (12)..(12): 2'-deoxy-2'-Fluoro
  misc_feature (13)..(13): 2'-O-methyl
  misc_feature (14)..(16): 2'-deoxy-2'-Fluoro
  misc_feature (17)..(19): 2'-O-methyl
  misc_feature (20)..(20): n is thymidine
  misc_feature (21)..(21): 3'-3 attached terminal deoxyabasic moeity
aguaggucugauguucgaann

SEQ ID NO: 1712 - RNA, 21 nt, Artificial Sequence
  Description of Artificial Sequence:  siNA sense region
  misc_feature (1)..(1): 2'-deoxy-2'-fluoro
  misc_feature (2)..(3): 2'-O-methyl
  misc_feature (4)..(4): 2'-deoxy-2'-fluoro
  misc_feature (5)..(5): 2'-O-methyl
  misc_feature (6)..(6): 2'-deoxy-2'-fluoro
  misc_feature (7)..(8): 2'-O-methyl
  misc_feature (9)..(13): 2'-deoxy-2'-fluoro
  misc_feature (14)..(17): 2'-O-methyl
  misc_feature (18)..(19): 2'-deoxy-2'-fluoro
  misc_feature (20)..(20): n is thymidine
  misc_feature (21)..(21): 3'-3 attached terminal deoxyabasic moeity
ugguauagcccuuggaguunn

SEQ ID NO: 1713 - RNA, 21 nt, Artificial Sequence
  Description of Artificial Sequence:  siNA sense region
  misc_feature (1)..(1): 2'-O-methyl
  misc_feature (2)..(2): 2'-deoxy-2'-fluoro
  misc_feature (3)..(5): 2'-O-methyl
  misc_feature (6)..(8): 2'-deoxy-2'-fluoro
  misc_feature (9)..(10): 2'-O-methyl
  misc_feature (11)..(11): 2'-deoxy-2'-fluoro
  misc_feature (12)..(12): 2'-O-methyl
  misc_feature (13)..(13): 2'-deoxy-2'-fluoro
  misc_feature (14)..(15): 2'-O-methyl
  misc_feature (16)..(19): 2'-deoxy-2'-fluoro
  misc_feature (20)..(20): n is thymidine
  misc_feature (21)..(21): 3'-3 attached terminal deoxyabasic moeity
auggacuugguauagcccunn

SEQ ID NO: 1714 - RNA, 21 nt, Artificial Sequence
  Description of Artificial Sequence:  siNA sense region
  misc_feature (1)..(1): 2'-deoxy-2'-fluoro
  misc_feature (2)..(3): 2'-O-methyl
  misc_feature (4)..(4): 2'-deoxy-2'-fluoro
  misc_feature (5)..(7): 2'-O-methyl
  misc_feature (8)..(10): 2'-deoxy-2'-fluoro
  misc_feature (11)..(12): 2'-O-methyl
  misc_feature (13)..(13): 2'-deoxy-2'-fluoro
  misc_feature (14)..(14): 2'-O-methyl
  misc_feature (15)..(15): 2'-deoxy-2'-fluoro
  misc_feature (16)..(17): 2'-O-methyl
  misc_feature (18)..(19): 2'-deoxy-2'-fluoro
  misc_feature (20)..(20): n is thymidine
  misc_feature (21)..(21): 3'-3 attached terminal deoxyabasic moeity
cgauggacuugguauagccnn

SEQ ID NO: 1715 - RNA, 21 nt, Artificial Sequence
  Description of Artificial Sequence:  siNA sense region
  misc_feature (1)..(2): 2'-O-methyl
  misc_feature (3)..(4): 2'-deoxy-2'-fluoro
  misc_feature (5)..(5): 2'-O-methyl
  misc_feature (6)..(6): 2'-deoxy-2'-fluoro
  misc_feature (7)..(8): 2'-O-methyl
  misc_feature (9)..(9): 2'-deoxy-2'-fluoro
  misc_feature (10)..(10): 2'-O-methyl
  misc_feature (11)..(12): 2'-deoxy-2'-fluoro
  misc_feature (13)..(13): 2'-O-methyl
  misc_feature (14)..(17): 2'-deoxy-2'-fluoro
  misc_feature (18)..(19): 2'-O-methyl
  misc_feature (20)..(20): n is thymidine
  misc_feature (21)..(21): 3'-3 attached terminal deoxyabasic moeity
ggucauaguacugcuccagnn

SEQ ID NO: 1716 - RNA, 21 nt, Artificial Sequence
  Description of Artificial Sequence:  siNA sense region
  misc_feature (1)..(5): 2'-deoxy-2'-fluoro
  misc_feature (6)..(7): 2'-O-methyl
  misc_feature (8)..(8): 2'-deoxy-2'-fluoro
  misc_feature (9)..(10): 2'-O-methyl
  misc_feature (11)..(13): 2'-deoxy-2'-fluoro
  misc_feature (14)..(15): 2'-O-methyl
  misc_feature (16)..(16): 2'-deoxy-2'-fluoro
  misc_feature (17)..(19): 2'-O-methyl
  misc_feature (20)..(20): n is thymidine
  misc_feature (21)..(21): 3'-3 attached terminal deoxyabasic moeity
uuucuaacagucuggcgggnn

SEQ ID NO: 1717 - RNA, 21 nt, Artificial Sequence
  Description of Artificial Sequence:  siNA sense region
  misc_feature (1)..(4): 2'-deoxy-2'-fluoro
  misc_feature (5)..(5): 2'-O-methyl
  misc_feature (6)..(8): 2'-deoxy-2'-fluoro
  misc_feature (9)..(9): 2'-O-methyl
  misc_feature (10)..(11): 2'-deoxy-2'-fluoro
  misc_feature (12)..(12): 2'-O-methyl
  misc_feature (13)..(13): 2'-deoxy-2'-fluoro
  misc_feature (14)..(14): 2'-O-methyl
  misc_feature (15)..(15): 2'-deoxy-2'-fluoro
  misc_feature (16)..(16): 2'-O-methyl
  misc_feature (17)..(17): 2'-deoxy-2'-fluoro
  misc_feature (18)..(19): 2'-O-methyl
  misc_feature (20)..(20): n is thymidine
  misc_feature (21)..(21): 3'-3 attached terminal deoxyabasic moeity
uucugcucaccacacacagnn

SEQ ID NO: 1718 - RNA, 21 nt, Artificial Sequence
  Description of Artificial Sequence:  siNA sense region
  misc_feature (1)..(2): 2'-deoxy-2'-fluoro
  misc_feature (3)..(3): 2'-O-methyl
  misc_feature (4)..(8): 2'-deoxy-2'-fluoro
  misc_feature (9)..(9): 2'-O-methyl
  misc_feature (10)..(12): 2'-deoxy-2'-fluoro
  misc_feature (13)..(13): 2'-O-methyl
  misc_feature (14)..(15): 2'-deoxy-2'-fluoro
  misc_feature (16)..(16): 2'-O-methyl
  misc_feature (17)..(17): 2'-deoxy-2'-fluoro
  misc_feature (18)..(18): 2'-O-methyl
  misc_feature (19)..(19): 2'-deoxy-2'-fluoro
  misc_feature (20)..(20): n is thymidine
  misc_feature (21)..(21): 3'-3 attached terminal deoxyabasic moeity
ccacuucugcucaccacacnn

SEQ ID NO: 1719 - RNA, 21 nt, Artificial Sequence
  Description of Artificial Sequence:  siNA sense region
  misc_feature (20)..(20): n is thymidine
  misc_feature (21)..(21): 3'-3 attached terminal deoxyabasic moeity
aguaggucugauguucgaann

SEQ ID NO: 1720 - RNA, 21 nt, Artificial Sequence
  Description of Artificial Sequence:  siNA sense region
  misc_feature (20)..(20): n is thymidine
  misc_feature (21)..(21): 3'-3 attached terminal deoxyabasic moeity
ugguauagcccuuggaguunn

SEQ ID NO: 1721 - RNA, 21 nt, Artificial Sequence
  Description of Artificial Sequence:  siNA sense region
  misc_feature (20)..(20): n is thymidine
  misc_feature (21)..(21): 3'-3 attached terminal deoxyabasic moeity
auggacuugguauagcccunn

SEQ ID NO: 1722 - RNA, 21 nt, Artificial Sequence
  Description of Artificial Sequence:  siNA sense region
  misc_feature (20)..(20): n is thymidine
  misc_feature (21)..(21): 3'-3 attached terminal deoxyabasic moeity
cgauggacuugguauagccnn

SEQ ID NO: 1723 - RNA, 21 nt, Artificial Sequence
  Description of Artificial Sequence:  siNA sense region
  misc_feature (20)..(20): n is thymidine
  misc_feature (21)..(21): 3'-3 attached terminal deoxyabasic moeity
ggucauaguacugcuccagnn

SEQ ID NO: 1724 - RNA, 21 nt, Artificial Sequence
  Description of Artificial Sequence:  siNA sense region
  misc_feature (20)..(20): n is thymidine
  misc_feature (21)..(21): 3'-3 attached terminal deoxyabasic moeity
uuucuaacagucuggcgggnn

SEQ ID NO: 1725 - RNA, 21 nt, Artificial Sequence
  Description of Artificial Sequence:  siNA sense region
  misc_feature (20)..(20): n is thymidine
  misc_feature (21)..(21): 3'-3 attached terminal deoxyabasic moeity
uucugcucaccacacacagnn

SEQ ID NO: 1726 - RNA, 21 nt, Artificial Sequence
  Description of Artificial Sequence:  siNA sense region
  misc_feature (20)..(20): n is thymidine
  misc_feature (21)..(21): 3'-3 attached terminal deoxyabasic moeity
ccacuucugcucaccacacnn

SEQ ID NO: 1727 - RNA, 21 nt, Artificial Sequence
  Description of Artificial Sequence:  siNA sense region
  misc_feature (20)..(21): n is thymidine
agcaagcgugacaacaauunn

SEQ ID NO: 1728 - RNA, 21 nt, Artificial Sequence
  Description of Artificial Sequence:  siNA sense region
  misc_feature (20)..(21): n is thymidine
cagcuuggaacaccaugucnn

SEQ ID NO: 1729 - RNA, 21 nt, Artificial Sequence
  Description of Artificial Sequence:  siNA sense region
  misc_feature (20)..(21): n is thymidine
uuucccagcugacucagaann

SEQ ID NO: 1730 - RNA, 21 nt, Artificial Sequence
  Description of Artificial Sequence:  siNA sense region
  misc_feature (20)..(21): n is thymidine
uucccagcugacucagaacnn

SEQ ID NO: 1731 - RNA, 21 nt, Artificial Sequence
  Description of Artificial Sequence:  siNA sense region
  misc_feature (20)..(21): n is thymidine
aacuuaaagccagucaggcnn

SEQ ID NO: 1732 - RNA, 21 nt, Artificial Sequence
  Description of Artificial Sequence:  siNA sense region
  misc_feature (20)..(21): n is thymidine
gcaagggauuuguuauccann

SEQ ID NO: 1733 - RNA, 21 nt, Artificial Sequence
  Description of Artificial Sequence:  siNA sense region
  misc_feature (20)..(21): n is thymidine
augucaacagauccgacuunn

SEQ ID NO: 1734 - RNA, 21 nt, Artificial Sequence
  Description of Artificial Sequence:  siNA sense region
  misc_feature (20)..(21): n is thymidine
uuggccucugauacagacann

SEQ ID NO: 1735 - RNA, 21 nt, Artificial Sequence
  Description of Artificial Sequence:  siNA sense region
  misc_feature (20)..(21): n is thymidine
aauuguugucacgcuugcunn

SEQ ID NO: 1736 - RNA, 21 nt, Artificial Sequence
  Description of Artificial Sequence:  siNA sense region
  misc_feature (20)..(21): n is thymidine
gacaugguguuccaagcugnn

SEQ ID NO: 1737 - RNA, 21 nt, Artificial Sequence
  Description of Artificial Sequence:  siNA sense region
  misc_feature (20)..(21): n is thymidine
uucugagucagcugggaaann

SEQ ID NO: 1738 - RNA, 21 nt, Artificial Sequence
  Description of Artificial Sequence:  siNA sense region
  misc_feature (20)..(21): n is thymidine
guucugagucagcugggaann

SEQ ID NO: 1739 - RNA, 21 nt, Artificial Sequence
  Description of Artificial Sequence:  siNA sense region
  misc_feature (20)..(21): n is thymidine
gccugacuggcuuuaaguunn

SEQ ID NO: 1740 - RNA, 21 nt, Artificial Sequence
  Description of Artificial Sequence:  siNA sense region
  misc_feature (20)..(21): n is thymidine
uggauaacaaaucccuugcnn

SEQ ID NO: 1741 - RNA, 21 nt, Artificial Sequence
  Description of Artificial Sequence:  siNA sense region
  misc_feature (20)..(21): n is thymidine
aagucggaucuguugacaunn

SEQ ID NO: 1742 - RNA, 21 nt, Artificial Sequence
  Description of Artificial Sequence:  siNA sense region
  misc_feature (20)..(21): n is thymidine
ugucuguaucagaggccaann

SEQ ID NO: 1743 - RNA, 21 nt, Artificial Sequence
  Description of Artificial Sequence:  siNA sense region
  misc_feature (1)..(1): 5'-3 attached terminal deoxyabasic moeity
  misc_feature (3)..(3): 2'-deoxy-2'-fluoro
  misc_feature (7)..(7): 2'-deoxy-2'-fluoro
  misc_feature (9)..(9): 2'-deoxy-2'-fluoro
  misc_feature (12)..(12): 2'-deoxy-2'-fluoro
  misc_feature (15)..(15): 2'-deoxy-2'-fluoro
  misc_feature (18)..(19): 2'-deoxy-2'-fluoro
  misc_feature (20)..(20): n is thymidine
  misc_feature (21)..(21): 3'-3 attached terminal deoxyabasic moeity
agcaagcgugacaacaauunn

SEQ ID NO: 1744 - RNA, 21 nt, Artificial Sequence
  Description of Artificial Sequence:  siNA sense region
  misc_feature (1)..(1): 2'-deoxy-2'-fluoro
  misc_feature (1)..(1): 5'-3 attached terminal deoxyabasic moeity
  misc_feature (4)..(6): 2'-deoxy-2'-fluoro
  misc_feature (11)..(11): 2'-deoxy-2'-fluoro
  misc_feature (13)..(14): 2'-deoxy-2'-fluoro
  misc_feature (16)..(16): 2'-deoxy-2'-fluoro
  misc_feature (18)..(19): 2'-deoxy-2'-fluoro
  misc_feature (20)..(20): n is thymidine
  misc_feature (21)..(21): 3'-3 attached terminal deoxyabasic moeity
cagcuuggaacaccaugucnn

SEQ ID NO: 1745 - RNA, 21 nt, Artificial Sequence
  Description of Artificial Sequence:  siNA sense region
  misc_feature (1)..(1): 5'-3 attached terminal deoxyabasic moeity
  misc_feature (1)..(6): 2'-deoxy-2'-fluoro
  misc_feature (9)..(10): 2'-deoxy-2'-fluoro
  misc_feature (13)..(15): 2'-deoxy-2'-fluoro
  misc_feature (20)..(20): n is thymidine
  misc_feature (21)..(21): 3'-3 attached terminal deoxyabasic moeity
uuucccagcugacucagaann

SEQ ID NO: 1746 - RNA, 21 nt, Artificial Sequence
  Description of Artificial Sequence:  siNA sense region
  misc_feature (1)..(5): 2'-deoxy-2'-fluoro
  misc_feature (1)..(1): 5'-3 attached terminal deoxyabasic moeity
  misc_feature (8)..(9): 2'-deoxy-2'-fluoro
  misc_feature (12)..(14): 2'-deoxy-2'-fluoro
  misc_feature (19)..(19): 2'-deoxy-2'-fluoro
  misc_feature (20)..(20): n is thymidine
  misc_feature (21)..(21): 3'-3 attached terminal deoxyabasic moeity
uucccagcugacucagaacnn

SEQ ID NO: 1747 - RNA, 21 nt, Artificial Sequence
  Description of Artificial Sequence:  siNA sense region
  misc_feature (1)..(1): 5'-3 attached terminal deoxyabasic moeity
  misc_feature (3)..(5): 2'-deoxy-2'-fluoro
  misc_feature (10)..(11): 2'-deoxy-2'-fluoro
  misc_feature (14)..(15): 2'-deoxy-2'-fluoro
  misc_feature (19)..(19): 2'-deoxy-2'-fluoro
  misc_feature (20)..(20): n is thymidine
  misc_feature (21)..(21): 3'-3 attached terminal deoxyabasic moeity
aacuuaaagccagucaggcnn

SEQ ID NO: 1748 - RNA, 21 nt, Artificial Sequence
  Description of Artificial Sequence:  siNA sense region
  misc_feature (1)..(1): 5'-3 attached terminal deoxyabasic moeity
  misc_feature (2)..(2): 2'-deoxy-2'-fluoro
  misc_feature (9)..(11): 2'-deoxy-2'-fluoro
  misc_feature (13)..(14): 2'-deoxy-2'-fluoro
  misc_feature (16)..(18): 2'-deoxy-2'-fluoro
  misc_feature (20)..(20): n is thymidine
  misc_feature (21)..(21): 3'-3 attached terminal deoxyabasic moeity
gcaagggauuuguuauccann

SEQ ID NO: 1749 - RNA, 21 nt, Artificial Sequence
  Description of Artificial Sequence:  siNA sense region
  misc_feature (1)..(1): 5'-3 attached terminal deoxyabasic moeity
  misc_feature (2)..(2): 2'-deoxy-2'-fluoro
  misc_feature (4)..(5): 2'-deoxy-2'-fluoro
  misc_feature (8)..(8): 2'-deoxy-2'-fluoro
  misc_feature (12)..(14): 2'-deoxy-2'-fluoro
  misc_feature (17)..(19): 2'-deoxy-2'-fluoro
  misc_feature (20)..(20): n is thymidine
  misc_feature (21)..(21): 3'-3 attached terminal deoxyabasic moeity
augucaacagauccgacuunn

SEQ ID NO: 1750 - RNA, 21 nt, Artificial Sequence
  Description of Artificial Sequence:  siNA sense region
  misc_feature (1)..(2): 2'-deoxy-2'-fluoro
  misc_feature (1)..(1): 5'-3 attached terminal deoxyabasic moeity
  misc_feature (5)..(9): 2'-deoxy-2'-fluoro
  misc_feature (12)..(12): 2'-deoxy-2'-fluoro
  misc_feature (14)..(14): 2'-deoxy-2'-fluoro
  misc_feature (18)..(18): 2'-deoxy-2'-fluoro
  misc_feature (20)..(20): n is thymidine
  misc_feature (21)..(21): 3'-3 attached terminal deoxyabasic moeity
uuggccucugauacagacann

SEQ ID NO: 1751 - RNA, 21 nt, Artificial Sequence
  Description of Artificial Sequence:  siNA sense region
  misc_feature (3)..(4): 2'-deoxy-2'-fluoro
  misc_feature (6)..(7): 2'-deoxy-2'-fluoro
  misc_feature (9)..(10): 2'-deoxy-2'-fluoro
  misc_feature (12)..(12): 2'-deoxy-2'-fluoro
  misc_feature (14)..(16): 2'-deoxy-2'-fluoro
  misc_feature (18)..(19): 2'-deoxy-2'-fluoro
  misc_feature (20)..(20): Phosphorothioate 3'-Internucleotide Linkage
  misc_feature (21)..(21): n is thymidine
aauuguugucacgcuugcunn

SEQ ID NO: 1752 - RNA, 21 nt, Artificial Sequence
  Description of Artificial Sequence:  siNA sense region
  misc_feature (3)..(3): 2'-deoxy-2'-fluoro
  misc_feature (5)..(5): 2'-deoxy-2'-fluoro
  misc_feature (8)..(8): 2'-deoxy-2'-fluoro
  misc_feature (10)..(13): 2'-deoxy-2'-fluoro
  misc_feature (18)..(18): 2'-deoxy-2'-fluoro
  misc_feature (20)..(20): Phosphorothioate 3'-Internucleotide Linkage
  misc_feature (21)..(21): n is thymidine
gacaugguguuccaagcugnn

SEQ ID NO: 1753 - RNA, 21 nt, Artificial Sequence
  Description of Artificial Sequence:  siNA sense region
  misc_feature (1)..(4): 2'-deoxy-2'-fluoro
  misc_feature (8)..(9): 2'-deoxy-2'-fluoro
  misc_feature (12)..(13): 2'-deoxy-2'-fluoro
  misc_feature (20)..(20): Phosphorothioate 3'-Internucleotide Linkage
  misc_feature (21)..(21): n is thymidine
uucugagucagcugggaaann

SEQ ID NO: 1754 - RNA, 21 nt, Artificial Sequence
  Description of Artificial Sequence:  siNA sense region
  misc_feature (2)..(5): 2'-deoxy-2'-fluoro
  misc_feature (9)..(10): 2'-deoxy-2'-fluoro
  misc_feature (13)..(14): 2'-deoxy-2'-fluoro
  misc_feature (20)..(20): Phosphorothioate 3'-Internucleotide Linkage
  misc_feature (21)..(21): n is thymidine
guucugagucagcugggaann

SEQ ID NO: 1755 - RNA, 21 nt, Artificial Sequence
  Description of Artificial Sequence:  siNA sense region
  misc_feature (2)..(4): 2'-deoxy-2'-fluoro
  misc_feature (7)..(8): 2'-deoxy-2'-fluoro
  misc_feature (11)..(14): 2'-deoxy-2'-fluoro
  misc_feature (18)..(19): 2'-deoxy-2'-fluoro
  misc_feature (20)..(20): Phosphorothioate 3'-Internucleotide Linkage
  misc_feature (21)..(21): n is thymidine
gccugacuggcuuuaaguunn

SEQ ID NO: 1756 - RNA, 21 nt, Artificial Sequence
  Description of Artificial Sequence:  siNA sense region
  misc_feature (1)..(1): 2'-deoxy-2'-fluoro
  misc_feature (5)..(5): 2'-deoxy-2'-fluoro
  misc_feature (8)..(8): 2'-deoxy-2'-fluoro
  misc_feature (12)..(17): 2'-deoxy-2'-fluoro
  misc_feature (19)..(19): 2'-deoxy-2'-fluoro
  misc_feature (20)..(20): Phosphorothioate 3'-Internucleotide Linkage
  misc_feature (21)..(21): n is thymidine
uggauaacaaaucccuugcnn

SEQ ID NO: 1757 - RNA, 21 nt, Artificial Sequence
  Description of Artificial Sequence:  siNA sense region
  misc_feature (4)..(5): 2'-deoxy-2'-fluoro
  misc_feature (9)..(11): 2'-deoxy-2'-fluoro
  misc_feature (13)..(14): 2'-deoxy-2'-fluoro
  misc_feature (17)..(17): 2'-deoxy-2'-fluoro
  misc_feature (19)..(19): 2'-deoxy-2'-fluoro
  misc_feature (20)..(20): Phosphorothioate 3'-Internucleotide Linkage
  misc_feature (21)..(21): n is thymidine
aagucggaucuguugacaunn

SEQ ID NO: 1758 - RNA, 21 nt, Artificial Sequence
  Description of Artificial Sequence:  siNA sense region
  misc_feature (1)..(1): 2'-deoxy-2'-fluoro
  misc_feature (3)..(5): 2'-deoxy-2'-fluoro
  misc_feature (7)..(7): 2'-deoxy-2'-fluoro
  misc_feature (9)..(10): 2'-deoxy-2'-fluoro
  misc_feature (16)..(17): 2'-deoxy-2'-fluoro
  misc_feature (20)..(20): Phosphorothioate 3'-Internucleotide Linkage
  misc_feature (21)..(21): n is thymidine
ugucuguaucagaggccaann

SEQ ID NO: 1759 - RNA, 21 nt, Artificial Sequence
  Description of Artificial Sequence:  siNA sense region
  misc_feature (1)..(2): deoxy
  misc_feature (1)..(1): 5'-3 attached terminal deoxyabasic moeity
  misc_feature (3)..(3): 2'-deoxy-2'-fluoro
  misc_feature (4)..(6): deoxy
  misc_feature (7)..(7): 2'-deoxy-2'-fluoro
  misc_feature (8)..(8): deoxy
  misc_feature (9)..(9): 2'-deoxy-2'-fluoro
  misc_feature (10)..(11): deoxy
  misc_feature (12)..(12): 2'-deoxy-2'-fluoro
  misc_feature (13)..(14): deoxy
  misc_feature (15)..(15): 2'-deoxy-2'-fluoro
  misc_feature (16)..(17): deoxy
  misc_feature (18)..(19): 2'-deoxy-2'-fluoro
  misc_feature (20)..(20): n is thymidine
  misc_feature (21)..(21): 3'-3 attached terminal deoxyabasic moeity
agcaagcgugacaacaauunn

SEQ ID NO: 1760 - RNA, 21 nt, Artificial Sequence
  Description of Artificial Sequence:  siNA sense region
  misc_feature (1)..(1): 5'-3 attached terminal deoxyabasic moeity
  misc_feature (1)..(1): 2'-deoxy-2'-fluoro
  misc_feature (2)..(3): deoxy
  misc_feature (4)..(6): 2'-deoxy-2'-fluoro
  misc_feature (7)..(10): deoxy
  misc_feature (11)..(11): 2'-deoxy-2'-fluoro
  misc_feature (12)..(12): deoxy
  misc_feature (13)..(14): 2'-deoxy-2'-fluoro
  misc_feature (15)..(15): deoxy
  misc_feature (16)..(16): 2'-deoxy-2'-fluoro
  misc_feature (17)..(17): deoxy
  misc_feature (18)..(19): 2'-deoxy-2'-fluoro
  misc_feature (20)..(20): n is thymidine
  misc_feature (21)..(21): 3'-3 attached terminal deoxyabasic moeity
cagcuuggaacaccaugucnn

SEQ ID NO: 1761 - RNA, 21 nt, Artificial Sequence
  Description of Artificial Sequence:  siNA sense region
  misc_feature (1)..(6): 2'-deoxy-2'-fluoro
  misc_feature (1)..(1): 5'-3 attached terminal deoxyabasic moeity
  misc_feature (7)..(8): deoxy
  misc_feature (9)..(10): 2'-deoxy-2'-fluoro
  misc_feature (11)..(12): deoxy
  misc_feature (13)..(15): 2'-deoxy-2'-fluoro
  misc_feature (16)..(19): deoxy
  misc_feature (20)..(20): n is thymidine
  misc_feature (21)..(21): 3'-3 attached terminal deoxyabasic moeity
uuucccagcugacucagaann

SEQ ID NO: 1762 - RNA, 21 nt, Artificial Sequence
  Description of Artificial Sequence:  siNA sense region
  misc_feature (1)..(1): 5'-3 attached terminal deoxyabasic moeity
  misc_feature (1)..(5): 2'-deoxy-2'-fluoro
  misc_feature (6)..(7): deoxy
  misc_feature (8)..(9): 2'-deoxy-2'-fluoro
  misc_feature (10)..(11): deoxy
  misc_feature (12)..(14): 2'-deoxy-2'-fluoro
  misc_feature (15)..(18): deoxy
  misc_feature (19)..(19): 2'-deoxy-2'-fluoro
  misc_feature (20)..(20): n is thymidine
  misc_feature (21)..(21): 3'-3 attached terminal deoxyabasic moeity
uucccagcugacucagaacnn

SEQ ID NO: 1763 - RNA, 21 nt, Artificial Sequence
  Description of Artificial Sequence:  siNA sense region
  misc_feature (1)..(2): deoxy
  misc_feature (1)..(1): 5'-3 attached terminal deoxyabasic moeity
  misc_feature (3)..(5): 2'-deoxy-2'-fluoro
  misc_feature (6)..(9): deoxy
  misc_feature (10)..(11): 2'-deoxy-2'-fluoro
  misc_feature (12)..(13): deoxy
  misc_feature (14)..(15): 2'-deoxy-2'-fluoro
  misc_feature (16)..(18): deoxy
  misc_feature (19)..(19): 2'-deoxy-2'-fluoro
  misc_feature (20)..(20): n is thymidine
  misc_feature (21)..(21): 3'-3 attached terminal deoxyabasic moeity
aacuuaaagccagucaggcnn

SEQ ID NO: 1764 - RNA, 21 nt, Artificial Sequence
  Description of Artificial Sequence:  siNA sense region
  misc_feature (1)..(1): 5'-3 attached terminal deoxyabasic moeity
  misc_feature (1)..(1): deoxy
  misc_feature (2)..(2): 2'-deoxy-2'-fluoro
  misc_feature (3)..(8): deoxy
  misc_feature (9)..(11): 2'-deoxy-2'-fluoro
  misc_feature (12)..(12): deoxy
  misc_feature (13)..(14): 2'-deoxy-2'-fluoro
  misc_feature (15)..(15): deoxy
  misc_feature (16)..(18): 2'-deoxy-2'-fluoro
  misc_feature (19)..(19): deoxy
  misc_feature (20)..(20): n is thymidine
  misc_feature (21)..(21): 3'-3 attached terminal deoxyabasic moeity
gcaagggauuuguuauccann

SEQ ID NO: 1765 - RNA, 21 nt, Artificial Sequence
  Description of Artificial Sequence:  siNA sense region
  misc_feature (1)..(1): deoxy
  misc_feature (1)..(1): 5'-3 attached terminal deoxyabasic moeity
  misc_feature (2)..(2): 2'-deoxy-2'-fluoro
  misc_feature (3)..(3): deoxy
  misc_feature (4)..(5): 2'-deoxy-2'-fluoro
  misc_feature (6)..(7): deoxy
  misc_feature (8)..(8): 2'-deoxy-2'-fluoro
  misc_feature (9)..(11): deoxy
  misc_feature (12)..(14): 2'-deoxy-2'-fluoro
  misc_feature (15)..(16): deoxy
  misc_feature (17)..(19): 2'-deoxy-2'-fluoro
  misc_feature (20)..(20): n is thymidine
  misc_feature (21)..(21): 3'-3 attached terminal deoxyabasic moeity
augucaacagauccgacuunn

SEQ ID NO: 1766 - RNA, 21 nt, Artificial Sequence
  Description of Artificial Sequence:  siNA sense region
  misc_feature (1)..(1): 5'-3 attached terminal deoxyabasic moeity
  misc_feature (1)..(2): 2'-deoxy-2'-fluoro
  misc_feature (3)..(4): deoxy
  misc_feature (5)..(9): 2'-deoxy-2'-fluoro
  misc_feature (10)..(11): deoxy
  misc_feature (12)..(12): 2'-deoxy-2'-fluoro
  misc_feature (13)..(13): deoxy
  misc_feature (14)..(14): 2'-deoxy-2'-fluoro
  misc_feature (15)..(17): deoxy
  misc_feature (18)..(18): 2'-deoxy-2'-fluoro
  misc_feature (19)..(19): deoxy
  misc_feature (20)..(20): n is thymidine
  misc_feature (21)..(21): 3'-3 attached terminal deoxyabasic moeity
uuggccucugauacagacann

SEQ ID NO: 1767 - RNA, 21 nt, Artificial Sequence
  Description of Artificial Sequence:  siNA sense region
  misc_feature (1)..(2): deoxy
  misc_feature (3)..(4): 2'-deoxy-2'-fluoro
  misc_feature (5)..(5): deoxy
  misc_feature (6)..(7): 2'-deoxy-2'-fluoro
  misc_feature (8)..(8): deoxy
  misc_feature (9)..(10): 2'-deoxy-2'-fluoro
  misc_feature (11)..(11): deoxy
  misc_feature (12)..(12): 2'-deoxy-2'-fluoro
  misc_feature (13)..(13): deoxy
  misc_feature (14)..(16): 2'-deoxy-2'-fluoro
  misc_feature (17)..(17): deoxy
  misc_feature (18)..(19): 2'-deoxy-2'-fluoro
  misc_feature (20)..(20): Phosphorothioate 3'-Internucleotide Linkage
  misc_feature (21)..(21): n is thymidine
aauuguugucacgcuugcunn

SEQ ID NO: 1768 - RNA, 21 nt, Artificial Sequence
  Description of Artificial Sequence:  siNA sense region
  misc_feature (1)..(2): deoxy
  misc_feature (3)..(3): 2'-deoxy-2'-fluoro
  misc_feature (4)..(4): deoxy
  misc_feature (5)..(5): 2'-deoxy-2'-fluoro
  misc_feature (6)..(7): deoxy
  misc_feature (8)..(8): 2'-deoxy-2'-fluoro
  misc_feature (9)..(9): deoxy
  misc_feature (10)..(13): 2'-deoxy-2'-fluoro
  misc_feature (14)..(16): deoxy
  misc_feature (17)..(18): 2'-deoxy-2'-fluoro
  misc_feature (19)..(19): deoxy
  misc_feature (20)..(20): Phosphorothioate 3'-Internucleotide Linkage
  misc_feature (21)..(21): n is thymidine
gacaugguguuccaagcugnn

SEQ ID NO: 1769 - RNA, 21 nt, Artificial Sequence
  Description of Artificial Sequence:  siNA sense region
  misc_feature (1)..(4): 2'-deoxy-2'-fluoro
  misc_feature (5)..(7): deoxy
  misc_feature (8)..(9): 2'-deoxy-2'-fluoro
  misc_feature (10)..(11): deoxy
  misc_feature (12)..(13): 2'-deoxy-2'-fluoro
  misc_feature (14)..(19): deoxy
  misc_feature (20)..(20): Phosphorothioate 3'-Internucleotide Linkage
  misc_feature (21)..(21): n is thymidine
uucugagucagcugggaaann

SEQ ID NO: 1770 - RNA, 21 nt, Artificial Sequence
  Description of Artificial Sequence:  siNA sense region
  misc_feature (1)..(1): deoxy
  misc_feature (2)..(5): 2'-deoxy-2'-fluoro
  misc_feature (6)..(8): deoxy
  misc_feature (9)..(10): 2'-deoxy-2'-fluoro
  misc_feature (11)..(12): deoxy
  misc_feature (13)..(14): 2'-deoxy-2'-fluoro
  misc_feature (15)..(19): deoxy
  misc_feature (20)..(20): Phosphorothioate 3'-Internucleotide Linkage
  misc_feature (21)..(21): n is thymidine
guucugagucagcugggaann

SEQ ID NO: 1771 - RNA, 21 nt, Artificial Sequence
  Description of Artificial Sequence:  siNA sense region
  misc_feature (1)..(1): deoxy
  misc_feature (2)..(4): 2'-deoxy-2'-fluoro
  misc_feature (5)..(6): deoxy
  misc_feature (7)..(8): 2'-deoxy-2'-fluoro
  misc_feature (9)..(10): deoxy
  misc_feature (11)..(14): 2'-deoxy-2'-fluoro
  misc_feature (15)..(17): deoxy
  misc_feature (18)..(19): 2'-deoxy-2'-fluoro
  misc_feature (20)..(20): Phosphorothioate 3'-Internucleotide Linkage
  misc_feature (21)..(21): n is thymidine
gccugacuggcuuuaaguunn

SEQ ID NO: 1772 - RNA, 21 nt, Artificial Sequence
  Description of Artificial Sequence:  siNA sense region
  misc_feature (1)..(1): 2'-deoxy-2'-fluoro
  misc_feature (2)..(4): deoxy
  misc_feature (5)..(5): 2'-deoxy-2'-fluoro
  misc_feature (6)..(7): deoxy
  misc_feature (8)..(8): 2'-deoxy-2'-fluoro
  misc_feature (9)..(11): deoxy
  misc_feature (12)..(17): 2'-deoxy-2'-fluoro
  misc_feature (18)..(18): deoxy
  misc_feature (19)..(19): 2'-deoxy-2'-fluoro
  misc_feature (20)..(20): Phosphorothioate 3'-Internucleotide Linkage
  misc_feature (21)..(21): n is thymidine
uggauaacaaaucccuugcnn

SEQ ID NO: 1773 - RNA, 21 nt, Artificial Sequence
  Description of Artificial Sequence:  siNA sense region
  misc_feature (1)..(3): deoxy
  misc_feature (4)..(5): 2'-deoxy-2'-fluoro
  misc_feature (6)..(8): deoxy
  misc_feature (9)..(11): 2'-deoxy-2'-fluoro
  misc_feature (12)..(12): deoxy
  misc_feature (13)..(14): 2'-deoxy-2'-fluoro
  misc_feature (15)..(16): deoxy
  misc_feature (17)..(17): 2'-deoxy-2'-fluoro
  misc_feature (18)..(18): deoxy
  misc_feature (19)..(19): 2'-deoxy-2'-fluoro
  misc_feature (20)..(20): Phosphorothioate 3'-Internucleotide Linkage
  misc_feature (21)..(21): n is thymidine
aagucggaucuguugacaunn

SEQ ID NO: 1774 - RNA, 21 nt, Artificial Sequence
  Description of Artificial Sequence:  siNA sense region
  misc_feature (1)..(1): 2'-deoxy-2'-fluoro
  misc_feature (2)..(2): deoxy
  misc_feature (3)..(5): 2'-deoxy-2'-fluoro
  misc_feature (6)..(6): deoxy
  misc_feature (7)..(7): 2'-deoxy-2'-fluoro
  misc_feature (8)..(8): deoxy
  misc_feature (9)..(10): 2'-deoxy-2'-fluoro
  misc_feature (11)..(15): deoxy
  misc_feature (16)..(17): 2'-deoxy-2'-fluoro
  misc_feature (18)..(19): deoxy
  misc_feature (20)..(20): Phosphorothioate 3'-Internucleotide Linkage
  misc_feature (21)..(21): n is thymidine
ugucuguaucagaggccaann

SEQ ID NO: 1775 - RNA, 21 nt, Artificial Sequence
  Description of Artificial Sequence:  siNA sense region
  misc_feature (1)..(2): 2'-O-methyl
  misc_feature (1)..(1): 5'-3 attached terminal deoxyabasic moeity
  misc_feature (3)..(3): 2'-deoxy-2'-fluoro
  misc_feature (4)..(6): 2'-O-methyl
  misc_feature (7)..(7): 2'-deoxy-2'-fluoro
  misc_feature (8)..(8): 2'-O-methyl
  misc_feature (9)..(9): 2'-deoxy-2'-fluoro
  misc_feature (10)..(11): 2'-O-methyl
  misc_feature (12)..(12): 2'-deoxy-2'-fluoro
  misc_feature (13)..(14): 2'-O-methyl
  misc_feature (15)..(15): 2'-deoxy-2'-fluoro
  misc_feature (16)..(17): 2'-O-methyl
  misc_feature (18)..(19): 2'-deoxy-2'-fluoro
  misc_feature (20)..(20): n is thymidine
  misc_feature (21)..(21): 3'-3 attached terminal deoxyabasic moeity
agcaagcgugacaacaauunn

SEQ ID NO: 1776 - RNA, 21 nt, Artificial Sequence
  Description of Artificial Sequence:  siNA sense region
  misc_feature (1)..(1): 5'-3 attached terminal deoxyabasic moeity
  misc_feature (1)..(1): 2'-deoxy-2'-fluoro
  misc_feature (2)..(3): 2'-O-methyl
  misc_feature (4)..(6): 2'-deoxy-2'-fluoro
  misc_feature (7)..(10): 2'-O-methyl
  misc_feature (11)..(11): 2'-deoxy-2'-fluoro
  misc_feature (12)..(12): 2'-O-methyl
  misc_feature (13)..(14): 2'-deoxy-2'-fluoro
  misc_feature (15)..(15): 2'-O-methyl
  misc_feature (16)..(16): 2'-deoxy-2'-fluoro
  misc_feature (17)..(17): 2'-O-methyl
  misc_feature (18)..(19): 2'-deoxy-2'-fluoro
  misc_feature (20)..(20): n is thymidine
  misc_feature (21)..(21): 3'-3 attached terminal deoxyabasic moeity
cagcuuggaacaccaugucnn

SEQ ID NO: 1777 - RNA, 21 nt, Artificial Sequence
  Description of Artificial Sequence:  siNA sense region
  misc_feature (1)..(6): 2'-deoxy-2'-fluoro
  misc_feature (1)..(1): 5'-3 attached terminal deoxyabasic moeity
  misc_feature (7)..(8): 2'-O-methyl
  misc_feature (9)..(10): 2'-deoxy-2'-fluoro
  misc_feature (11)..(12): 2'-O-methyl
  misc_feature (13)..(15): 2'-deoxy-2'-fluoro
  misc_feature (16)..(19): 2'-O-methyl
  misc_feature (20)..(20): n is thymidine
  misc_feature (21)..(21): 3'-3 attached terminal deoxyabasic moeity
uuucccagcugacucagaann

SEQ ID NO: 1778 - RNA, 21 nt, Artificial Sequence
  Description of Artificial Sequence:  siNA sense region
  misc_feature (1)..(1): 5'-3 attached terminal deoxyabasic moeity
  misc_feature (1)..(5): 2'-deoxy-2'-fluoro
  misc_feature (6)..(7): 2'-O-methyl
  misc_feature (8)..(9): 2'-deoxy-2'-fluoro
  misc_feature (10)..(11): 2'-O-methyl
  misc_feature (12)..(14): 2'-deoxy-2'-fluoro
  misc_feature (15)..(18): 2'-O-methyl
  misc_feature (19)..(19): 2'-deoxy-2'-fluoro
  misc_feature (20)..(20): n is thymidine
  misc_feature (21)..(21): 3'-3 attached terminal deoxyabasic moeity
uucccagcugacucagaacnn

SEQ ID NO: 1779 - RNA, 21 nt, Artificial Sequence
  Description of Artificial Sequence:  siNA sense region
  misc_feature (1)..(2): 2'-O-methyl
  misc_feature (1)..(1): 5'-3 attached terminal deoxyabasic moeity
  misc_feature (3)..(5): 2'-deoxy-2'-fluoro
  misc_feature (6)..(9): 2'-O-methyl
  misc_feature (10)..(11): 2'-deoxy-2'-fluoro
  misc_feature (12)..(13): 2'-O-methyl
  misc_feature (14)..(15): 2'-deoxy-2'-fluoro
  misc_feature (16)..(18): 2'-O-methyl
  misc_feature (19)..(19): 2'-deoxy-2'-fluoro
  misc_feature (20)..(20): n is thymidine
  misc_feature (21)..(21): 3'-3 attached terminal deoxyabasic moeity
aacuuaaagccagucaggcnn

SEQ ID NO: 1780 - RNA, 21 nt, Artificial Sequence
  Description of Artificial Sequence:  siNA sense region
  misc_feature (1)..(1): 5'-3 attached terminal deoxyabasic moeity
  misc_feature (1)..(1): 2'-O-methyl
  misc_feature (2)..(2): 2'-deoxy-2'-fluoro
  misc_feature (3)..(8): 2'-O-methyl
  misc_feature (9)..(11): 2'-deoxy-2'-fluoro
  misc_feature (12)..(12): 2'-O-methyl
  misc_feature (13)..(14): 2'-deoxy-2'-fluoro
  misc_feature (15)..(15): 2'-O-methyl
  misc_feature (16)..(18): 2'-deoxy-2'-fluoro
  misc_feature (19)..(19): 2'-O-methyl
  misc_feature (20)..(20): n is thymidine
  misc_feature (21)..(21): 3'-3 attached terminal deoxyabasic moeity
gcaagggauuuguuauccann

SEQ ID NO: 1781 - RNA, 21 nt, Artificial Sequence
  Description of Artificial Sequence:  siNA sense region
  misc_feature (1)..(1): 2'-O-methyl
  misc_feature (1)..(1): 5'-3 attached terminal deoxyabasic moeity
  misc_feature (2)..(2): 2'-deoxy-2'-fluoro
  misc_feature (3)..(3): 2'-O-methyl
  misc_feature (4)..(5): 2'-deoxy-2'-fluoro
  misc_feature (6)..(7): 2'-O-methyl
  misc_feature (8)..(8): 2'-deoxy-2'-fluoro
  misc_feature (9)..(11): 2'-O-methyl
  misc_feature (12)..(14): 2'-deoxy-2'-fluoro
  misc_feature (15)..(16): 2'-O-methyl
  misc_feature (17)..(19): 2'-deoxy-2'-fluoro
  misc_feature (20)..(20): n is thymidine
  misc_feature (21)..(21): 3'-3 attached terminal deoxyabasic moeity
augucaacagauccgacuunn

SEQ ID NO: 1782 - RNA, 21 nt, Artificial Sequence
  Description of Artificial Sequence:  siNA sense region
  misc_feature (1)..(1): 5'-3 attached terminal deoxyabasic moeity
  misc_feature (1)..(2): 2'-deoxy-2'-fluoro
  misc_feature (3)..(4): 2'-O-methyl
  misc_feature (5)..(9): 2'-deoxy-2'-fluoro
  misc_feature (10)..(11): 2'-O-methyl
  misc_feature (12)..(12): 2'-deoxy-2'-fluoro
  misc_feature (13)..(13): 2'-O-methyl
  misc_feature (14)..(14): 2'-deoxy-2'-fluoro
  misc_feature (15)..(17): 2'-O-methyl
  misc_feature (18)..(18): 2'-deoxy-2'-fluoro
  misc_feature (19)..(19): 2'-O-methyl
  misc_feature (20)..(20): n is thymidine
  misc_feature (21)..(21): 3'-3 attached terminal deoxyabasic moeity
uuggccucugauacagacann

SEQ ID NO: 1783 - RNA, 21 nt, Artificial Sequence
  Description of Artificial Sequence:  siNA sense region
  misc_feature (1)..(2): 2'-O-methyl
  misc_feature (3)..(4): 2'-deoxy-2'-fluoro
  misc_feature (5)..(5): 2'-O-methyl
  misc_feature (6)..(7): 2'-deoxy-2'-fluoro
  misc_feature (8)..(8): 2'-O-methyl
  misc_feature (9)..(10): 2'-deoxy-2'-fluoro
  misc_feature (11)..(11): 2'-O-methyl
  misc_feature (12)..(12): 2'-deoxy-2'-fluoro
  misc_feature (13)..(13): 2'-O-methyl
  misc_feature (14)..(16): 2'-deoxy-2'-fluoro
  misc_feature (17)..(17): 2'-O-methyl
  misc_feature (18)..(19): 2'-deoxy-2'-fluoro
  misc_feature (20)..(20): Phosphorothioate 3'-Internucleotide Linkage
  misc_feature (21)..(21): n is thymidine
aauuguugucacgcuugcunn

SEQ ID NO: 1784 - RNA, 21 nt, Artificial Sequence
  Description of Artificial Sequence:  siNA sense region
  misc_feature (1)..(2): 2'-O-methyl
  misc_feature (3)..(3): 2'-deoxy-2'-fluoro
  misc_feature (4)..(4): 2'-O-methyl
  misc_feature (5)..(5): 2'-deoxy-2'-fluoro
  misc_feature (6)..(7): 2'-O-methyl
  misc_feature (8)..(8): 2'-deoxy-2'-fluoro
  misc_feature (9)..(9): 2'-O-methyl
  misc_feature (10)..(13): 2'-deoxy-2'-fluoro
  misc_feature (14)..(16): 2'-O-methyl
  misc_feature (17)..(18): 2'-deoxy-2'-fluoro
  misc_feature (19)..(19): 2'-O-methyl
  misc_feature (20)..(20): Phosphorothioate 3'-Internucleotide Linkage
  misc_feature (21)..(21): n is thymidine
gacaugguguuccaagcugnn

SEQ ID NO: 1785 - RNA, 21 nt, Artificial Sequence
  Description of Artificial Sequence:  siNA sense region
  misc_feature (1)..(4): 2'-deoxy-2'-fluoro
  misc_feature (5)..(7): 2'-O-methyl
  misc_feature (8)..(9): 2'-deoxy-2'-fluoro
  misc_feature (10)..(11): 2'-O-methyl
  misc_feature (12)..(13): 2'-deoxy-2'-fluoro
  misc_feature (14)..(19): 2'-O-methyl
  misc_feature (20)..(20): Phosphorothioate 3'-Internucleotide Linkage
  misc_feature (21)..(21): n is thymidine
uucugagucagcugggaaann

SEQ ID NO: 1786 - RNA, 21 nt, Artificial Sequence
  Description of Artificial Sequence:  siNA sense region
  misc_feature (1)..(1): 2'-O-methyl
  misc_feature (2)..(5): 2'-deoxy-2'-fluoro
  misc_feature (6)..(8): 2'-O-methyl
  misc_feature (9)..(10): 2'-deoxy-2'-fluoro
  misc_feature (11)..(12): 2'-O-methyl
  misc_feature (13)..(14): 2'-deoxy-2'-fluoro
  misc_feature (15)..(19): 2'-O-methyl
  misc_feature (20)..(20): Phosphorothioate 3'-Internucleotide Linkage
  misc_feature (21)..(21): n is thymidine
guucugagucagcugggaann

SEQ ID NO: 1787 - RNA, 21 nt, Artificial Sequence
  Description of Artificial Sequence:  siNA sense region
  misc_feature (1)..(1): 2'-O-methyl
  misc_feature (2)..(4): 2'-deoxy-2'-fluoro
  misc_feature (5)..(6): 2'-O-methyl
  misc_feature (7)..(8): 2'-deoxy-2'-fluoro
  misc_feature (9)..(10): 2'-O-methyl
  misc_feature (11)..(14): 2'-deoxy-2'-fluoro
  misc_feature (15)..(17): 2'-O-methyl
  misc_feature (18)..(19): 2'-deoxy-2'-fluoro
  misc_feature (20)..(20): Phosphorothioate 3'-Internucleotide Linkage
  misc_feature (21)..(21): n is thymidine
gccugacuggcuuuaaguunn

SEQ ID NO: 1788 - RNA, 21 nt, Artificial Sequence
  Description of Artificial Sequence:  siNA sense region
  misc_feature (1)..(1): 2'-deoxy-2'-fluoro
  misc_feature (2)..(4): 2'-O-methyl
  misc_feature (5)..(5): 2'-deoxy-2'-fluoro
  misc_feature (6)..(7): 2'-O-methyl
  misc_feature (8)..(8): 2'-deoxy-2'-fluoro
  misc_feature (9)..(11): 2'-O-methyl
  misc_feature (12)..(17): 2'-deoxy-2'-fluoro
  misc_feature (18)..(18): 2'-O-methyl
  misc_feature (19)..(19): 2'-deoxy-2'-fluoro
  misc_feature (20)..(20): Phosphorothioate 3'-Internucleotide Linkage
  misc_feature (21)..(21): n is thymidine
uggauaacaaaucccuugcnn

SEQ ID NO: 1789 - RNA, 21 nt, Artificial Sequence
  Description of Artificial Sequence:  siNA sense region
  misc_feature (1)..(3): 2'-O-methyl
  misc_feature (4)..(5): 2'-deoxy-2'-fluoro
  misc_feature (6)..(8): 2'-O-methyl
  misc_feature (9)..(11): 2'-deoxy-2'-fluoro
  misc_feature (12)..(12): 2'-O-methyl
  misc_feature (13)..(14): 2'-deoxy-2'-fluoro
  misc_feature (15)..(16): 2'-O-methyl
  misc_feature (17)..(17): 2'-deoxy-2'-fluoro
  misc_feature (18)..(18): 2'-O-methyl
  misc_feature (19)..(19): 2'-deoxy-2'-fluoro
  misc_feature (20)..(20): Phosphorothioate 3'-Internucleotide Linkage
  misc_feature (21)..(21): n is thymidine
aagucggaucuguugacaunn

SEQ ID NO: 1790 - RNA, 21 nt, Artificial Sequence
  Description of Artificial Sequence:  siNA sense region
  misc_feature (1)..(1): 2'-deoxy-2'-fluoro
  misc_feature (2)..(2): 2'-O-methyl
  misc_feature (3)..(5): 2'-deoxy-2'-fluoro
  misc_feature (6)..(6): 2'-O-methyl
  misc_feature (7)..(7): 2'-deoxy-2'-fluoro
  misc_feature (8)..(8): 2'-O-methyl
  misc_feature (9)..(10): 2'-deoxy-2'-fluoro
  misc_feature (11)..(15): 2'-O-methyl
  misc_feature (16)..(17): 2'-deoxy-2'-fluoro
  misc_feature (18)..(19): 2'-O-methyl
  misc_feature (20)..(20): Phosphorothioate 3'-Internucleotide Linkage
  misc_feature (21)..(21): n is thymidine
ugucuguaucagaggccaann

SEQ ID NO: 1791 - RNA, 21 nt, Artificial Sequence
  Description of Artificial Sequence:  siNA sense region
  misc_feature (1)..(1): 5'-3 attached terminal deoxyabasic moeity
  misc_feature (20)..(20): n is thymidine
  misc_feature (21)..(21): 3'-3 attached terminal deoxyabasic moeity
agcaagcgugacaacaauunn

SEQ ID NO: 1792 - RNA, 21 nt, Artificial Sequence
  Description of Artificial Sequence:  siNA sense region
  misc_feature (1)..(1): 5'-3 attached terminal deoxyabasic moeity
  misc_feature (20)..(20): n is thymidine
  misc_feature (21)..(21): 3'-3 attached terminal deoxyabasic moeity
cagcuuggaacaccaugucnn

SEQ ID NO: 1793 - RNA, 21 nt, Artificial Sequence
  Description of Artificial Sequence:  siNA sense region
  misc_feature (1)..(1): 5'-3 attached terminal deoxyabasic moeity
  misc_feature (20)..(20): n is thymidine
  misc_feature (21)..(21): 3'-3 attached terminal deoxyabasic moeity
uuucccagcugacucagaann

SEQ ID NO: 1794 - RNA, 21 nt, Artificial Sequence
  Description of Artificial Sequence:  siNA sense region
  misc_feature (1)..(1): 5'-3 attached terminal deoxyabasic moeity
  misc_feature (20)..(20): n is thymidine
  misc_feature (21)..(21): 3'-3 attached terminal deoxyabasic moeity
uucccagcugacucagaacnn

SEQ ID NO: 1795 - RNA, 21 nt, Artificial Sequence
  Description of Artificial Sequence:  siNA sense region
  misc_feature (1)..(1): 5'-3 attached terminal deoxyabasic moeity
  misc_feature (20)..(20): n is thymidine
  misc_feature (21)..(21): 3'-3 attached terminal deoxyabasic moeity
aacuuaaagccagucaggcnn

SEQ ID NO: 1796 - RNA, 21 nt, Artificial Sequence
  Description of Artificial Sequence:  siNA sense region
  misc_feature (1)..(1): 5'-3 attached terminal deoxyabasic moeity
  misc_feature (20)..(20): n is thymidine
  misc_feature (21)..(21): 3'-3 attached terminal deoxyabasic moeity
gcaagggauuuguuauccann

SEQ ID NO: 1797 - RNA, 21 nt, Artificial Sequence
  Description of Artificial Sequence:  siNA sense region
  misc_feature (1)..(1): 5'-3 attached terminal deoxyabasic moeity
  misc_feature (20)..(20): n is thymidine
  misc_feature (21)..(21): 3'-3 attached terminal deoxyabasic moeity
augucaacagauccgacuunn

SEQ ID NO: 1798 - RNA, 21 nt, Artificial Sequence
  Description of Artificial Sequence:  siNA sense region
  misc_feature (1)..(1): 5'-3 attached terminal deoxyabasic moeity
  misc_feature (20)..(20): n is thymidine
  misc_feature (21)..(21): 3'-3 attached terminal deoxyabasic moeity
uuggccucugauacagacann

SEQ ID NO: 1799 - RNA, 21 nt, Artificial Sequence
  Description of Artificial Sequence:  siNA sense region
  misc_feature (20)..(20): Phosphorothioate 3'-Internucleotide Linkage
  misc_feature (21)..(21): n is thymidine
aauuguugucacgcuugcunn

SEQ ID NO: 1800 - RNA, 21 nt, Artificial Sequence
  Description of Artificial Sequence:  siNA sense region
  misc_feature (20)..(20): Phosphorothioate 3'-Internucleotide Linkage
  misc_feature (21)..(21): n is thymidine
gacaugguguuccaagcugnn

SEQ ID NO: 1801 - RNA, 21 nt, Artificial Sequence
  Description of Artificial Sequence:  siNA sense region
  misc_feature (20)..(20): Phosphorothioate 3'-Internucleotide Linkage
  misc_feature (21)..(21): n is thymidine
uucugagucagcugggaaann

SEQ ID NO: 1802 - RNA, 21 nt, Artificial Sequence
  Description of Artificial Sequence:  siNA sense region
  misc_feature (20)..(20): Phosphorothioate 3'-Internucleotide Linkage
  misc_feature (21)..(21): n is thymidine
guucugagucagcugggaann

SEQ ID NO: 1803 - RNA, 21 nt, Artificial Sequence
  Description of Artificial Sequence:  siNA sense region
  misc_feature (20)..(20): Phosphorothioate 3'-Internucleotide Linkage
  misc_feature (21)..(21): n is thymidine
gccugacuggcuuuaaguunn

SEQ ID NO: 1804 - RNA, 21 nt, Artificial Sequence
  Description of Artificial Sequence:  siNA sense region
  misc_feature (20)..(20): Phosphorothioate 3'-Internucleotide Linkage
  misc_feature (21)..(21): n is thymidine
uggauaacaaaucccuugcnn

SEQ ID NO: 1805 - RNA, 21 nt, Artificial Sequence
  Description of Artificial Sequence:  siNA sense region
  misc_feature (20)..(20): Phosphorothioate 3'-Internucleotide Linkage
  misc_feature (21)..(21): n is thymidine
aagucggaucuguugacaunn

SEQ ID NO: 1806 - RNA, 21 nt, Artificial Sequence
  Description of Artificial Sequence:  siNA sense region
  misc_feature (20)..(20): Phosphorothioate 3'-Internucleotide Linkage
  misc_feature (21)..(21): n is thymidine
ugucuguaucagaggccaann

SEQ ID NO: 1807 - RNA, 21 nt, Artificial Sequence
  Description of Artificial Sequence:  siNA sense region
  misc_feature (1)..(2): 2'-O-methyl
  misc_feature (3)..(4): 2'-deoxy-2'-fluoro
  misc_feature (5)..(5): 2'-O-methyl
  misc_feature (6)..(7): 2'-deoxy-2'-fluoro
  misc_feature (8)..(8): 2'-O-methyl
  misc_feature (9)..(10): 2'-deoxy-2'-fluoro
  misc_feature (11)..(11): 2'-O-methyl
  misc_feature (12)..(12): 2'-deoxy-2'-fluoro
  misc_feature (13)..(13): 2'-O-methyl
  misc_feature (14)..(16): 2'-deoxy-2'-fluoro
  misc_feature (17)..(17): 2'-O-methyl
  misc_feature (18)..(19): 2'-deoxy-2'-fluoro
  misc_feature (20)..(20): n is thymidine
  misc_feature (21)..(21): 3'-3 attached terminal deoxyabasic moeity
aauuguugucacgcuugcunn

SEQ ID NO: 1808 - RNA, 21 nt, Artificial Sequence
  Description of Artificial Sequence:  siNA sense region
  misc_feature (1)..(2): 2'-O-methyl
  misc_feature (3)..(3): 2'-deoxy-2'-fluoro
  misc_feature (4)..(4): 2'-O-methyl
  misc_feature (5)..(5): 2'-deoxy-2'-fluoro
  misc_feature (6)..(7): 2'-O-methyl
  misc_feature (8)..(8): 2'-deoxy-2'-fluoro
  misc_feature (9)..(9): 2'-O-methyl
  misc_feature (10)..(13): 2'-deoxy-2'-fluoro
  misc_feature (14)..(16): 2'-O-methyl
  misc_feature (17)..(18): 2'-deoxy-2'-fluoro
  misc_feature (19)..(19): 2'-O-methyl
  misc_feature (20)..(20): n is thymidine
  misc_feature (21)..(21): 3'-3 attached terminal deoxyabasic moeity
gacaugguguuccaagcugnn

SEQ ID NO: 1809 - RNA, 21 nt, Artificial Sequence
  Description of Artificial Sequence:  siNA sense region
  misc_feature (1)..(4): 2'-deoxy-2'-fluoro
  misc_feature (5)..(7): 2'-O-methyl
  misc_feature (8)..(9): 2'-deoxy-2'-fluoro
  misc_feature (10)..(11): 2'-O-methyl
  misc_feature (12)..(13): 2'-deoxy-2'-fluoro
  misc_feature (14)..(19): 2'-O-methyl
  misc_feature (20)..(20): n is thymidine
  misc_feature (21)..(21): 3'-3 attached terminal deoxyabasic moeity
uucugagucagcugggaaann

SEQ ID NO: 1810 - RNA, 21 nt, Artificial Sequence
  Description of Artificial Sequence:  siNA sense region
  misc_feature (1)..(1): 2'-O-methyl
  misc_feature (2)..(5): 2'-deoxy-2'-fluoro
  misc_feature (6)..(8): 2'-O-methyl
  misc_feature (9)..(10): 2'-deoxy-2'-fluoro
  misc_feature (11)..(12): 2'-O-methyl
  misc_feature (13)..(14): 2'-deoxy-2'-fluoro
  misc_feature (15)..(19): 2'-O-methyl
  misc_feature (20)..(20): n is thymidine
  misc_feature (21)..(21): 3'-3 attached terminal deoxyabasic moeity
guucugagucagcugggaann

SEQ ID NO: 1811 - RNA, 21 nt, Artificial Sequence
  Description of Artificial Sequence:  siNA sense region
  misc_feature (1)..(1): 2'-O-methyl
  misc_feature (2)..(4): 2'-deoxy-2'-fluoro
  misc_feature (5)..(6): 2'-O-methyl
  misc_feature (7)..(8): 2'-deoxy-2'-fluoro
  misc_feature (9)..(10): 2'-O-methyl
  misc_feature (11)..(14): 2'-deoxy-2'-fluoro
  misc_feature (15)..(17): 2'-O-methyl
  misc_feature (18)..(19): 2'-deoxy-2'-fluoro
  misc_feature (20)..(20): n is thymidine
  misc_feature (21)..(21): 3'-3 attached terminal deoxyabasic moeity
gccugacuggcuuuaaguunn

SEQ ID NO: 1812 - RNA, 21 nt, Artificial Sequence
  Description of Artificial Sequence:  siNA sense region
  misc_feature (1)..(1): 2'-deoxy-2'-fluoro
  misc_feature (2)..(4): 2'-O-methyl
  misc_feature (5)..(5): 2'-deoxy-2'-fluoro
  misc_feature (6)..(7): 2'-O-methyl
  misc_feature (8)..(8): 2'-deoxy-2'-fluoro
  misc_feature (9)..(11): 2'-O-methyl
  misc_feature (12)..(17): 2'-deoxy-2'-fluoro
  misc_feature (18)..(18): 2'-O-methyl
  misc_feature (19)..(19): 2'-deoxy-2'-fluoro
  misc_feature (20)..(20): n is thymidine
  misc_feature (21)..(21): 3'-3 attached terminal deoxyabasic moeity
uggauaacaaaucccuugcnn

SEQ ID NO: 1813 - RNA, 21 nt, Artificial Sequence
  Description of Artificial Sequence:  siNA sense region
  misc_feature (1)..(3): 2'-O-methyl
  misc_feature (4)..(5): 2'-deoxy-2'-fluoro
  misc_feature (6)..(8): 2'-O-methyl
  misc_feature (9)..(11): 2'-deoxy-2'-fluoro
  misc_feature (12)..(12): 2'-O-methyl
  misc_feature (13)..(14): 2'-deoxy-2'-fluoro
  misc_feature (15)..(16): 2'-O-methyl
  misc_feature (17)..(17): 2'-deoxy-2'-fluoro
  misc_feature (18)..(18): 2'-O-methyl
  misc_feature (19)..(19): 2'-deoxy-2'-fluoro
  misc_feature (20)..(20): n is thymidine
  misc_feature (21)..(21): 3'-3 attached terminal deoxyabasic moeity
aagucggaucuguugacaunn

SEQ ID NO: 1814 - RNA, 21 nt, Artificial Sequence
  Description of Artificial Sequence:  siNA sense region
  misc_feature (1)..(1): 2'-deoxy-2'-fluoro
  misc_feature (2)..(2): 2'-O-methyl
  misc_feature (3)..(5): 2'-deoxy-2'-fluoro
  misc_feature (6)..(6): 2'-O-methyl
  misc_feature (7)..(7): 2'-deoxy-2'-fluoro
  misc_feature (8)..(8): 2'-O-methyl
  misc_feature (9)..(10): 2'-deoxy-2'-fluoro
  misc_feature (11)..(15): 2'-O-methyl
  misc_feature (16)..(17): 2'-deoxy-2'-fluoro
  misc_feature (18)..(19): 2'-O-methyl
  misc_feature (20)..(20): n is thymidine
  misc_feature (21)..(21): 3'-3 attached terminal deoxyabasic moeity
ugucuguaucagaggccaann

SEQ ID NO: 1815 - RNA, 21 nt, Artificial Sequence
  Description of Artificial Sequence:  siNA sense region
  misc_feature (20)..(20): n is thymidine
  misc_feature (21)..(21): 3'-3 attached terminal deoxyabasic moeity
aauuguugucacgcuugcunn

SEQ ID NO: 1816 - RNA, 21 nt, Artificial Sequence
  Description of Artificial Sequence:  siNA sense region
  misc_feature (20)..(20): n is thymidine
  misc_feature (21)..(21): 3'-3 attached terminal deoxyabasic moeity
gacaugguguuccaagcugnn

SEQ ID NO: 1817 - RNA, 21 nt, Artificial Sequence
  Description of Artificial Sequence:  siNA sense region
  misc_feature (20)..(20): n is thymidine
  misc_feature (21)..(21): 3'-3 attached terminal deoxyabasic moeity
uucugagucagcugggaaann

SEQ ID NO: 1818 - RNA, 21 nt, Artificial Sequence
  Description of Artificial Sequence:  siNA sense region
  misc_feature (20)..(20): n is thymidine
  misc_feature (21)..(21): 3'-3 attached terminal deoxyabasic moeity
guucugagucagcugggaann

SEQ ID NO: 1819 - RNA, 21 nt, Artificial Sequence
  Description of Artificial Sequence:  siNA sense region
  misc_feature (20)..(20): n is thymidine
  misc_feature (21)..(21): 3'-3 attached terminal deoxyabasic moeity
gccugacuggcuuuaaguunn

SEQ ID NO: 1820 - RNA, 21 nt, Artificial Sequence
  Description of Artificial Sequence:  siNA sense region
  misc_feature (20)..(20): n is thymidine
  misc_feature (21)..(21): 3'-3 attached terminal deoxyabasic moeity
uggauaacaaaucccuugcnn

SEQ ID NO: 1821 - RNA, 21 nt, Artificial Sequence
  Description of Artificial Sequence:  siNA sense region
  misc_feature (20)..(20): n is thymidine
  misc_feature (21)..(21): 3'-3 attached terminal deoxyabasic moeity
aagucggaucuguugacaunn

SEQ ID NO: 1822 - RNA, 21 nt, Artificial Sequence
  Description of Artificial Sequence:  siNA sense region
  misc_feature (20)..(20): n is thymidine
  misc_feature (21)..(21): 3'-3 attached terminal deoxyabasic moeity
ugucuguaucagaggccaann

SEQ ID NO: 1823 - RNA, 21 nt, Artificial Sequence
  Description of Artificial Sequence:  siNA sense region
  misc_feature (1)..(1): 5'-3 attached terminal deoxyabasic moeity
  misc_feature (1)..(3): 2'-deoxy-2'-fluoro
  misc_feature (6)..(8): 2'-deoxy-2'-fluoro
  misc_feature (12)..(12): 2'-deoxy-2'-fluoro
  misc_feature (15)..(16): 2'-deoxy-2'-fluoro
  misc_feature (18)..(18): 2'-deoxy-2'-fluoro
  misc_feature (20)..(20): n is thymidine
  misc_feature (21)..(21): 3'-3 attached terminal deoxyabasic moeity
uucagccuagacaacuguann

SEQ ID NO: 1824 - RNA, 21 nt, Artificial Sequence
  Description of Artificial Sequence:  siNA sense region
  misc_feature (1)..(1): 2'-deoxy-2'-fluoro
  misc_feature (2)..(2): 2'-O-methyl
  misc_feature (3)..(3): 2'-deoxy-2'-fluoro
  misc_feature (4)..(5): 2'-O-methyl
  misc_feature (6)..(7): 2'-deoxy-2'-fluoro
  misc_feature (8)..(8): 2'-O-methyl
  misc_feature (9)..(11): 2'-deoxy-2'-fluoro
  misc_feature (12)..(14): 2'-O-methyl
  misc_feature (15)..(16): 2'-deoxy-2'-fluoro
  misc_feature (17)..(19): 2'-O-methyl
  misc_feature (20)..(20): Phosphorothioate 3'-Internucleotide Linkage
  misc_feature (21)..(21): n is thymidine
uacaguugucuaggcugaann

SEQ ID NO: 1825 - RNA, 21 nt, Artificial Sequence
  Description of Artificial Sequence:  siNA sense region
  misc_feature (20)..(21): n is thymidine
cuacuuugcucaguaccacnn

SEQ ID NO: 1826 - RNA, 21 nt, Artificial Sequence
  Description of Artificial Sequence:  siNA sense region
  misc_feature (20)..(21): n is thymidine
ucugucuuugugggagggunn

SEQ ID NO: 1827 - RNA, 21 nt, Artificial Sequence
  Description of Artificial Sequence:  siNA sense region
  misc_feature (20)..(21): n is thymidine
caacuggcuucugugcacunn

SEQ ID NO: 1828 - RNA, 21 nt, Artificial Sequence
  Description of Artificial Sequence:  siNA sense region
  misc_feature (20)..(21): n is thymidine
cagagugaggauguguuuunn

SEQ ID NO: 1829 - RNA, 21 nt, Artificial Sequence
  Description of Artificial Sequence:  siNA sense region
  misc_feature (20)..(21): n is thymidine
cccaugucaccucagcugann

SEQ ID NO: 1830 - RNA, 21 nt, Artificial Sequence
  Description of Artificial Sequence:  siNA sense region
  misc_feature (20)..(21): n is thymidine
aagggucuucuuggcagcunn

SEQ ID NO: 1831 - RNA, 21 nt, Artificial Sequence
  Description of Artificial Sequence:  siNA sense region
  misc_feature (20)..(21): n is thymidine
acucuaagcuggagcucuunn

SEQ ID NO: 1832 - RNA, 21 nt, Artificial Sequence
  Description of Artificial Sequence:  siNA sense region
  misc_feature (20)..(21): n is thymidine
ggcuguaaucaguuaugccnn

SEQ ID NO: 1833 - RNA, 21 nt, Artificial Sequence
  Description of Artificial Sequence:  siNA sense region
  misc_feature (20)..(21): n is thymidine
gugguacugagcaaaguagnn

SEQ ID NO: 1834 - RNA, 21 nt, Artificial Sequence
  Description of Artificial Sequence:  siNA sense region
  misc_feature (20)..(21): n is thymidine
acccucccacaaagacagann

SEQ ID NO: 1835 - RNA, 21 nt, Artificial Sequence
  Description of Artificial Sequence:  siNA sense region
  misc_feature (20)..(21): n is thymidine
agugcacagaagccaguugnn

SEQ ID NO: 1836 - RNA, 21 nt, Artificial Sequence
  Description of Artificial Sequence:  siNA sense region
  misc_feature (20)..(21): n is thymidine
aaaacacauccucacucugnn

SEQ ID NO: 1837 - RNA, 21 nt, Artificial Sequence
  Description of Artificial Sequence:  siNA sense region
  misc_feature (20)..(21): n is thymidine
ucagcugaggugacaugggnn

SEQ ID NO: 1838 - RNA, 21 nt, Artificial Sequence
  Description of Artificial Sequence:  siNA sense region
  misc_feature (20)..(21): n is thymidine
agcugccaagaagacccuunn

SEQ ID NO: 1839 - RNA, 21 nt, Artificial Sequence
  Description of Artificial Sequence:  siNA sense region
  misc_feature (20)..(21): n is thymidine
aagagcuccagcuuagagunn

SEQ ID NO: 1840 - RNA, 21 nt, Artificial Sequence
  Description of Artificial Sequence:  siNA sense region
  misc_feature (20)..(21): n is thymidine
ggcauaacugauuacagccnn

SEQ ID NO: 1841 - RNA, 21 nt, Artificial Sequence
  Description of Artificial Sequence:  siNA sense region
  misc_feature (1)..(2): 2'-deoxy-2'-fluoro
  misc_feature (1)..(1): 5'-3 attached terminal deoxyabasic moeity
  misc_feature (4)..(7): 2'-deoxy-2'-fluoro
  misc_feature (9)..(11): 2'-deoxy-2'-fluoro
  misc_feature (14)..(14): 2'-deoxy-2'-fluoro
  misc_feature (16)..(17): 2'-deoxy-2'-fluoro
  misc_feature (19)..(19): 2'-deoxy-2'-fluoro
  misc_feature (20)..(20): n is thymidine
  misc_feature (21)..(21): 3'-3 attached terminal deoxyabasic moeity
cuacuuugcucaguaccacnn

SEQ ID NO: 1842 - RNA, 21 nt, Artificial Sequence
  Description of Artificial Sequence:  siNA sense region
  misc_feature (1)..(3): 2'-deoxy-2'-fluoro
  misc_feature (1)..(1): 5'-3 attached terminal deoxyabasic moeity
  misc_feature (5)..(9): 2'-deoxy-2'-fluoro
  misc_feature (11)..(11): 2'-deoxy-2'-fluoro
  misc_feature (19)..(19): 2'-deoxy-2'-fluoro
  misc_feature (20)..(20): n is thymidine
  misc_feature (21)..(21): 3'-3 attached terminal deoxyabasic moeity
ucugucuuugugggagggunn

SEQ ID NO: 1843 - RNA, 21 nt, Artificial Sequence
  Description of Artificial Sequence:  siNA sense region
  misc_feature (1)..(1): 2'-deoxy-2'-fluoro
  misc_feature (1)..(1): 5'-3 attached terminal deoxyabasic moeity
  misc_feature (4)..(5): 2'-deoxy-2'-fluoro
  misc_feature (8)..(12): 2'-deoxy-2'-fluoro
  misc_feature (14)..(14): 2'-deoxy-2'-fluoro
  misc_feature (16)..(16): 2'-deoxy-2'-fluoro
  misc_feature (18)..(19): 2'-deoxy-2'-fluoro
  misc_feature (20)..(20): n is thymidine
  misc_feature (21)..(21): 3'-3 attached terminal deoxyabasic moeity
caacuggcuucugugcacunn

SEQ ID NO: 1844 - RNA, 21 nt, Artificial Sequence
  Description of Artificial Sequence:  siNA sense region
  misc_feature (1)..(1): 2'-deoxy-2'-fluoro
  misc_feature (1)..(1): 5'-3 attached terminal deoxyabasic moeity
  misc_feature (6)..(6): 2'-deoxy-2'-fluoro
  misc_feature (12)..(12): 2'-deoxy-2'-fluoro
  misc_feature (14)..(14): 2'-deoxy-2'-fluoro
  misc_feature (16)..(19): 2'-deoxy-2'-fluoro
  misc_feature (20)..(20): n is thymidine
  misc_feature (21)..(21): 3'-3 attached terminal deoxyabasic moeity
cagagugaggauguguuuunn

SEQ ID NO: 1845 - RNA, 21 nt, Artificial Sequence
  Description of Artificial Sequence:  siNA sense region
  misc_feature (1)..(3): 2'-deoxy-2'-fluoro
  misc_feature (1)..(1): 5'-3 attached terminal deoxyabasic moeity
  misc_feature (5)..(5): 2'-deoxy-2'-fluoro
  misc_feature (7)..(8): 2'-deoxy-2'-fluoro
  misc_feature (10)..(13): 2'-deoxy-2'-fluoro
  misc_feature (16)..(17): 2'-deoxy-2'-fluoro
  misc_feature (20)..(20): n is thymidine
  misc_feature (21)..(21): 3'-3 attached terminal deoxyabasic moeity
cccaugucaccucagcugann

SEQ ID NO: 1846 - RNA, 21 nt, Artificial Sequence
  Description of Artificial Sequence:  siNA sense region
  misc_feature (1)..(1): 5'-3 attached terminal deoxyabasic moeity
  misc_feature (6)..(12): 3'-3 attached terminal deoxyabasic moeity
  misc_feature (15)..(15): 3'-3 attached terminal deoxyabasic moeity
  misc_feature (18)..(19): 3'-3 attached terminal deoxyabasic moeity
  misc_feature (20)..(20): n is thymidine
  misc_feature (21)..(21): 3'-3 attached terminal deoxyabasic moeity
aagggucuucuuggcagcunn

SEQ ID NO: 1847 - RNA, 21 nt, Artificial Sequence
  Description of Artificial Sequence:  siNA sense region
  misc_feature (1)..(1): 5'-3 attached terminal deoxyabasic moiety
  misc_feature (2)..(5): 2'-deoxy-2'-fluoro
  misc_feature (9)..(10): 2'-deoxy-2'-fluoro
  misc_feature (15)..(19): 2'-deoxy-2'-fluoro
  misc_feature (20)..(20): n is thymidine
  misc_feature (21)..(21): 3'-3 attached terminal deoxyabasic moiety
acucuaagcuggagcucuunn

SEQ ID NO: 1848 - RNA, 21 nt, Artificial Sequence
  Description of Artificial Sequence:  siNA sense region
  misc_feature (1)..(1): 5'-3 attached terminal deoxyabasic moiety
  misc_feature (3)..(4): 2'-deoxy-2'-fluoro
  misc_feature (6)..(6): 2'-deoxy-2'-fluoro
  misc_feature (9)..(10): 2'-deoxy-2'-fluoro
  misc_feature (13)..(14): 2'-deoxy-2'-fluoro
  misc_feature (16)..(16): 2'-deoxy-2'-fluoro
  misc_feature (18)..(19): 2'-deoxy-2'-fluoro
  misc_feature (20)..(20): n is thymidine
  misc_feature (21)..(21): 3'-3 attached terminal deoxyabasic moiety
ggcuguaaucaguuaugccnn

SEQ ID NO: 1849 - RNA, 21 nt, Artificial Sequence
  Description of Artificial Sequence:  siNA sense region
  misc_feature (2)..(2): 2'-deoxy-2'-fluoro
  misc_feature (5)..(5): 2'-deoxy-2'-fluoro
  misc_feature (7)..(8): 2'-deoxy-2'-fluoro
  misc_feature (12)..(12): 2'-deoxy-2'-fluoro
  misc_feature (17)..(17): 2'-deoxy-2'-fluoro
  misc_feature (20)..(21): internucleotide phosphorothioate linkage
gugguacugagcaaaguagnn

SEQ ID NO: 1850 - RNA, 21 nt, Artificial Sequence
  Description of Artificial Sequence:  siNA sense region
  misc_feature (2)..(8): 2'-deoxy-2'-fluoro
  misc_feature (10)..(10): 2'-deoxy-2'-fluoro
  misc_feature (16)..(16): 2'-deoxy-2'-fluoro
  misc_feature (20)..(21): internucleotide phosphorothioate linkage
acccucccacaaagacagann

SEQ ID NO: 1851 - RNA, 21 nt, Artificial Sequence
  Description of Artificial Sequence:  siNA sense region
  misc_feature (3)..(3): 2'-deoxy-2'-fluoro
  misc_feature (5)..(5): 2'-deoxy-2'-fluoro
  misc_feature (7)..(7): 2'-deoxy-2'-fluoro
  misc_feature (13)..(14): 2'-deoxy-2'-fluoro
  misc_feature (17)..(18): 2'-deoxy-2'-fluoro
  misc_feature (20)..(21): internucleotide phosphorothioate linkage
agugcacagaagccaguugnn

SEQ ID NO: 1852 - RNA, 21 nt, Artificial Sequence
  Description of Artificial Sequence:  siNA sense region
  misc_feature (5)..(5): 2'-deoxy-2'-fluoro
  misc_feature (7)..(7): 2'-deoxy-2'-fluoro
  misc_feature (9)..(13): 2'-deoxy-2'-fluoro
  misc_feature (15)..(18): 2'-deoxy-2'-fluoro
  misc_feature (20)..(21): internucleotide phosphorothioate linkage
aaaacacauccucacucugnn

SEQ ID NO: 1853 - RNA, 21 nt, Artificial Sequence
  Description of Artificial Sequence:  siNA sense region
  misc_feature (1)..(2): 2'-deoxy-2'-fluoro
  misc_feature (5)..(6): 2'-deoxy-2'-fluoro
  misc_feature (11)..(11): 2'-deoxy-2'-fluoro
  misc_feature (14)..(14): 2'-deoxy-2'-fluoro
  misc_feature (16)..(16): 2'-deoxy-2'-fluoro
  misc_feature (20)..(21): internucleotide phosphorothioate linkage
ucagcugaggugacaugggnn

SEQ ID NO: 1854 - RNA, 21 nt, Artificial Sequence
  Description of Artificial Sequence:  siNA sense region
  misc_feature (3)..(4): 2'-deoxy-2'-fluoro
  misc_feature (6)..(7): 2'-deoxy-2'-fluoro
  misc_feature (15)..(19): 2'-deoxy-2'-fluoro
  misc_feature (20)..(21): internucleotide phosphorothioate linkage
agcugccaagaagacccuunn

SEQ ID NO: 1855 - RNA, 21 nt, Artificial Sequence
  Description of Artificial Sequence:  siNA sense region
  misc_feature (6)..(9): 2'-deoxy-2'-fluoro
  misc_feature (12)..(14): 2'-deoxy-2'-fluoro
  misc_feature (19)..(19): 2'-deoxy-2'-fluoro
  misc_feature (20)..(21): internucleotide phosphorothioate linkage
aagagcuccagcuuagagunn

SEQ ID NO: 1856 - RNA, 21 nt, Artificial Sequence
  Description of Artificial Sequence:  siNA sense region
  misc_feature (3)..(3): 2'-deoxy-2'-fluoro
  misc_feature (5)..(5): 2'-deoxy-2'-fluoro
  misc_feature (8)..(9): 2'-deoxy-2'-fluoro
  misc_feature (12)..(13): 2'-deoxy-2'-fluoro
  misc_feature (15)..(15): 2'-deoxy-2'-fluoro
  misc_feature (18)..(19): 2'-deoxy-2'-fluoro
  misc_feature (20)..(21): internucleotide phosphorothioate linkage
ggcauaacugauuacagccnn

SEQ ID NO: 1857 - RNA, 21 nt, Artificial Sequence
  Description of Artificial Sequence:  siNA sense region
  misc_feature (1)..(1): 5'-3 attached terminal deoxyabasic moiety
  misc_feature (1)..(2): 2'-deoxy-2'-fluoro
  misc_feature (3)..(3): deoxy
  misc_feature (4)..(7): 2'-deoxy-2'-fluoro
  misc_feature (8)..(8): deoxy
  misc_feature (9)..(11): 2'-deoxy-2'-fluoro
  misc_feature (12)..(13): deoxy
  misc_feature (14)..(14): 2'-deoxy-2'-fluoro
  misc_feature (15)..(15): deoxy
  misc_feature (16)..(17): 2'-deoxy-2'-fluoro
  misc_feature (18)..(18): deoxy
  misc_feature (19)..(19): 2'-deoxy-2'-fluoro
  misc_feature (20)..(20): n is thymidine
  misc_feature (21)..(21): 3'-3 attached terminal deoxyabasic moiety
cuacuuugcucaguaccacnn

SEQ ID NO: 1858 - RNA, 21 nt, Artificial Sequence
  Description of Artificial Sequence:  siNA sense region
  misc_feature (1)..(1): 5'-3 attached terminal deoxyabasic moiety
  misc_feature (1)..(3): 2'-deoxy-2'-fluoro
  misc_feature (4)..(4): deoxy
  misc_feature (5)..(9): 2'-deoxy-2'-fluoro
  misc_feature (10)..(10): deoxy
  misc_feature (11)..(11): 2'-deoxy-2'-fluoro
  misc_feature (12)..(18): deoxy
  misc_feature (19)..(19): 2'-deoxy-2'-fluoro
  misc_feature (20)..(20): n is thymidine
  misc_feature (21)..(21): 3'-3 attached terminal deoxyabasic moiety
ucugucuuugugggagggunn

SEQ ID NO: 1859 - RNA, 21 nt, Artificial Sequence
  Description of Artificial Sequence:  siNA sense region
  misc_feature (1)..(1): 5'-3 attached terminal deoxyabasic moiety
  misc_feature (1)..(1): 2'-deoxy-2'-fluoro
  misc_feature (2)..(3): deoxy
  misc_feature (4)..(5): 2'-deoxy-2'-fluoro
  misc_feature (6)..(7): deoxy
  misc_feature (8)..(12): 2'-deoxy-2'-fluoro
  misc_feature (13)..(13): deoxy
  misc_feature (14)..(14): 2'-deoxy-2'-fluoro
  misc_feature (15)..(15): deoxy
  misc_feature (16)..(16): 2'-deoxy-2'-fluoro
  misc_feature (17)..(17): deoxy
  misc_feature (18)..(19): 2'-deoxy-2'-fluoro
  misc_feature (20)..(20): n is thymidine
  misc_feature (21)..(21): 3'-3 attached terminal deoxyabasic moiety
caacuggcuucugugcacunn

SEQ ID NO: 1860 - RNA, 21 nt, Artificial Sequence
  Description of Artificial Sequence:  siNA sense region
  misc_feature (1)..(1): 5'-3 attached terminal deoxyabasic moiety
  misc_feature (1)..(1): 2'-deoxy-2'-fluoro
  misc_feature (2)..(5): deoxy
  misc_feature (6)..(6): 2'-deoxy-2'-fluoro
  misc_feature (7)..(11): deoxy
  misc_feature (12)..(12): 2'-deoxy-2'-fluoro
  misc_feature (13)..(13): deoxy
  misc_feature (14)..(14): 2'-deoxy-2'-fluoro
  misc_feature (15)..(15): deoxy
  misc_feature (16)..(19): 2'-deoxy-2'-fluoro
  misc_feature (20)..(20): n is thymidine
  misc_feature (21)..(21): 3'-3 attached terminal deoxyabasic moiety
cagagugaggauguguuuunn

SEQ ID NO: 1861 - RNA, 21 nt, Artificial Sequence
  Description of Artificial Sequence:  siNA sense region
  misc_feature (1)..(1): 5'-3 attached terminal deoxyabasic moiety
  misc_feature (1)..(3): 2'-deoxy-2'-fluoro
  misc_feature (4)..(4): deoxy
  misc_feature (5)..(5): 2'-deoxy-2'-fluoro
  misc_feature (6)..(6): deoxy
  misc_feature (7)..(8): 2'-deoxy-2'-fluoro
  misc_feature (9)..(9): deoxy
  misc_feature (10)..(13): 2'-deoxy-2'-fluoro
  misc_feature (14)..(15): deoxy
  misc_feature (16)..(17): 2'-deoxy-2'-fluoro
  misc_feature (18)..(19): deoxy
  misc_feature (20)..(20): n is thymidine
  misc_feature (21)..(21): 3'-3 attached terminal deoxyabasic moiety
cccaugucaccucagcugann

SEQ ID NO: 1862 - RNA, 21 nt, Artificial Sequence
  Description of Artificial Sequence:  siNA sense region
  misc_feature (1)..(1): 5'-3 attached terminal deoxyabasic moiety
  misc_feature (1)..(5): deoxy
  misc_feature (6)..(12): 2'-deoxy-2'-fluoro
  misc_feature (13)..(14): deoxy
  misc_feature (15)..(15): 2'-deoxy-2'-fluoro
  misc_feature (16)..(17): deoxy
  misc_feature (18)..(19): 2'-deoxy-2'-fluoro
  misc_feature (20)..(20): n is thymidine
  misc_feature (21)..(21): 3'-3 attached terminal deoxyabasic moiety
aagggucuucuuggcagcunn

SEQ ID NO: 1863 - RNA, 21 nt, Artificial Sequence
  Description of Artificial Sequence:  siNA sense region
  misc_feature (1)..(1): 5'-3 attached terminal deoxyabasic moiety
  misc_feature (1)..(1): deoxy
  misc_feature (2)..(5): 2'-deoxy-2'-fluoro
  misc_feature (6)..(8): deoxy
  misc_feature (9)..(10): 2'-deoxy-2'-fluoro
  misc_feature (11)..(14): deoxy
  misc_feature (15)..(19): 2'-deoxy-2'-fluoro
  misc_feature (20)..(20): n is thymidine
  misc_feature (21)..(21): 3'-3 attached terminal deoxyabasic moiety
acucuaagcuggagcucuunn

SEQ ID NO: 1864 - RNA, 21 nt, Artificial Sequence
  Description of Artificial Sequence:  siNA sense region
  misc_feature (1)..(1): 5'-3 attached terminal deoxyabasic moiety
  misc_feature (1)..(2): deoxy
  misc_feature (3)..(4): 2'-deoxy-2'-fluoro
  misc_feature (5)..(5): deoxy
  misc_feature (6)..(6): 2'-deoxy-2'-fluoro
  misc_feature (7)..(8): deoxy
  misc_feature (9)..(10): 2'-deoxy-2'-fluoro
  misc_feature (11)..(12): deoxy
  misc_feature (13)..(14): 2'-deoxy-2'-fluoro
  misc_feature (15)..(15): deoxy
  misc_feature (16)..(16): 2'-deoxy-2'-fluoro
  misc_feature (17)..(17): deoxy
  misc_feature (18)..(19): 2'-deoxy-2'-fluoro
  misc_feature (20)..(20): n is thymidine
  misc_feature (21)..(21): 3'-3 attached terminal deoxyabasic moiety
ggcuguaaucaguuaugccnn

SEQ ID NO: 1865 - RNA, 21 nt, Artificial Sequence
  Description of Artificial Sequence:  siNA sense region
  misc_feature (1)..(1): deoxy
  misc_feature (2)..(2): 2'-deoxy-2'-fluoro
  misc_feature (3)..(4): deoxy
  misc_feature (5)..(5): 2'-deoxy-2'-fluoro
  misc_feature (6)..(6): deoxy
  misc_feature (7)..(8): 2'-deoxy-2'-fluoro
  misc_feature (9)..(11): deoxy
  misc_feature (12)..(12): 2'-deoxy-2'-fluoro
  misc_feature (13)..(16): deoxy
  misc_feature (17)..(17): 2'-deoxy-2'-fluoro
  misc_feature (18)..(19): deoxy
  misc_feature (20)..(21): internucleotide phosphorothioate linkage
gugguacugagcaaaguagnn

SEQ ID NO: 1866 - RNA, 21 nt, Artificial Sequence
  Description of Artificial Sequence:  siNA sense region
  misc_feature (1)..(1): deoxy
  misc_feature (2)..(8): 2'-deoxy-2'-fluoro
  misc_feature (9)..(9): deoxy
  misc_feature (10)..(10): 2'-deoxy-2'-fluoro
  misc_feature (11)..(15): deoxy
  misc_feature (16)..(16): 2'-deoxy-2'-fluoro
  misc_feature (17)..(19): deoxy
  misc_feature (20)..(21): internucleotide phosphorothioate linkage
acccucccacaaagacagann

SEQ ID NO: 1867 - RNA, 21 nt, Artificial Sequence
  Description of Artificial Sequence:  siNA sense region
  misc_feature (1)..(2): deoxy
  misc_feature (3)..(3): 2'-deoxy-2'-fluoro
  misc_feature (4)..(4): deoxy
  misc_feature (5)..(5): 2'-deoxy-2'-fluoro
  misc_feature (6)..(6): deoxy
  misc_feature (7)..(7): 2'-deoxy-2'-fluoro
  misc_feature (8)..(12): deoxy
  misc_feature (13)..(14): 2'-deoxy-2'-fluoro
  misc_feature (15)..(16): deoxy
  misc_feature (17)..(18): 2'-deoxy-2'-fluoro
  misc_feature (19)..(19): deoxy
  misc_feature (20)..(21): internucleotide phosphorothioate linkage
agugcacagaagccaguugnn

SEQ ID NO: 1868 - RNA, 21 nt, Artificial Sequence
  Description of Artificial Sequence:  siNA sense region
  misc_feature (1)..(4): deoxy
  misc_feature (5)..(5): 2'-deoxy-2'-fluoro
  misc_feature (6)..(6): deoxy
  misc_feature (7)..(7): 2'-deoxy-2'-fluoro
  misc_feature (8)..(8): deoxy
  misc_feature (9)..(13): 2'-deoxy-2'-fluoro
  misc_feature (14)..(14): deoxy
  misc_feature (15)..(18): 2'-deoxy-2'-fluoro
  misc_feature (19)..(19): deoxy
  misc_feature (20)..(21): internucleotide phosphorothioate linkage
aaaacacauccucacucugnn

SEQ ID NO: 1869 - RNA, 21 nt, Artificial Sequence
  Description of Artificial Sequence:  siNA sense region
  misc_feature (1)..(2): 2'-deoxy-2'-fluoro
  misc_feature (3)..(4): deoxy
  misc_feature (5)..(6): 2'-deoxy-2'-fluoro
  misc_feature (7)..(10): deoxy
  misc_feature (11)..(11): 2'-deoxy-2'-fluoro
  misc_feature (12)..(13): deoxy
  misc_feature (14)..(14): 2'-deoxy-2'-fluoro
  misc_feature (15)..(15): deoxy
  misc_feature (16)..(16): 2'-deoxy-2'-fluoro
  misc_feature (17)..(19): deoxy
  misc_feature (20)..(21): internucleotide phosphorothioate linkage
ucagcugaggugacaugggnn

SEQ ID NO: 1870 - RNA, 21 nt, Artificial Sequence
  Description of Artificial Sequence:  siNA sense region
  misc_feature (1)..(2): deoxy
  misc_feature (3)..(4): 2'-deoxy-2'-fluoro
  misc_feature (5)..(5): deoxy
  misc_feature (5)..(6): 2'-deoxy-2'-fluoro
  misc_feature (8)..(14): deoxy
  misc_feature (15)..(19): 2'-deoxy-2'-fluoro
  misc_feature (20)..(21): internucleotide phosphorothioate linkage
agcugccaagaagacccuunn

SEQ ID NO: 1871 - RNA, 21 nt, Artificial Sequence
  Description of Artificial Sequence:  siNA sense region
  misc_feature (1)..(5): deoxy
  misc_feature (6)..(9): 2'-deoxy-2'-fluoro
  misc_feature (10)..(11): deoxy
  misc_feature (12)..(14): 2'-deoxy-2'-fluoro
  misc_feature (15)..(18): deoxy
  misc_feature (19)..(19): 2'-deoxy-2'-fluoro
  misc_feature (20)..(21): internucleotide phosphorothioate linkage
aagagcuccagcuuagagunn

SEQ ID NO: 1872 - RNA, 21 nt, Artificial Sequence
  Description of Artificial Sequence:  siNA sense region
  misc_feature (1)..(2): deoxy
  misc_feature (3)..(3): 2'-deoxy-2'-fluoro
  misc_feature (4)..(4): deoxy
  misc_feature (5)..(5): 2'-deoxy-2'-fluoro
  misc_feature (6)..(7): deoxy
  misc_feature (8)..(9): 2'-deoxy-2'-fluoro
  misc_feature (10)..(11): deoxy
  misc_feature (12)..(13): 2'-deoxy-2'-fluoro
  misc_feature (14)..(14): deoxy
  misc_feature (15)..(15): 2'-deoxy-2'-fluoro
  misc_feature (16)..(17): deoxy
  misc_feature (18)..(19): 2'-deoxy-2'-fluoro
  misc_feature (20)..(21): internucleotide phosphorothioate linkage
ggcauaacugauuacagccnn

SEQ ID NO: 1873 - RNA, 21 nt, Artificial Sequence
  Description of Artificial Sequence:  siNA sense region
  misc_feature (1)..(1): 5'-3 attached terminal deoxyabasic moiety
  misc_feature (1)..(2): 2'-deoxy-2'-fluoro
  misc_feature (3)..(3): 2'-O-methyl
  misc_feature (4)..(7): 2'-deoxy-2'-fluoro
  misc_feature (8)..(8): 2'-O-methyl
  misc_feature (9)..(11): 2'-deoxy-2'-fluoro
  misc_feature (12)..(13): 2'-O-methyl
  misc_feature (14)..(14): 2'-deoxy-2'-fluoro
  misc_feature (15)..(15): 2'-O-methyl
  misc_feature (16)..(17): 2'-deoxy-2'-fluoro
  misc_feature (18)..(18): 2'-O-methyl
  misc_feature (19)..(19): 2'-deoxy-2'-fluoro
  misc_feature (20)..(20): n is thymidine
  misc_feature (21)..(21): 3'-3 attached terminal deoxyabasic moiety
cuacuuugcucaguaccacnn

SEQ ID NO: 1874 - RNA, 21 nt, Artificial Sequence
  Description of Artificial Sequence:  siNA sense region
  misc_feature (1)..(1): 5'-3 attached terminal deoxyabasic moiety
  misc_feature (1)..(3): 2'-deoxy-2'-fluoro
  misc_feature (4)..(4): 2'-O-methyl
  misc_feature (5)..(9): 2'-deoxy-2'-fluoro
  misc_feature (10)..(10): 2'-O-methyl
  misc_feature (11)..(11): 2'-deoxy-2'-fluoro
  misc_feature (12)..(18): 2'-O-methyl
  misc_feature (19)..(19): 2'-deoxy-2'-fluoro
  misc_feature (20)..(20): n is thymidine
  misc_feature (21)..(21): 3'-3 attached terminal deoxyabasic moiety
ucugucuuugugggagggunn

SEQ ID NO: 1875 - RNA, 21 nt, Artificial Sequence
  Description of Artificial Sequence:  siNA sense region
  misc_feature (1)..(1): 5'-3 attached terminal deoxyabasic moiety
  misc_feature (1)..(1): 2'-deoxy-2'-fluoro
  misc_feature (2)..(3): 2'-O-methyl
  misc_feature (4)..(5): 2'-deoxy-2'-fluoro
  misc_feature (6)..(7): 2'-O-methyl
  misc_feature (8)..(12): 2'-deoxy-2'-fluoro
  misc_feature (13)..(13): 2'-O-methyl
  misc_feature (14)..(14): 2'-deoxy-2'-fluoro
  misc_feature (15)..(15): 2'-O-methyl
  misc_feature (16)..(16): 2'-deoxy-2'-fluoro
  misc_feature (17)..(17): 2'-O-methyl
  misc_feature (18)..(19): 2'-deoxy-2'-fluoro
  misc_feature (20)..(20): n is thymidine
  misc_feature (21)..(21): 3'-3 attached terminal deoxyabasic moiety
caacuggcuucugugcacunn

SEQ ID NO: 1876 - RNA, 21 nt, Artificial Sequence
  Description of Artificial Sequence:  siNA sense region
  misc_feature (1)..(1): 5'-3 attached terminal deoxyabasic moiety
  misc_feature (1)..(1): 2'-deoxy-2'-fluoro
  misc_feature (2)..(5): 2'-O-methyl
  misc_feature (6)..(6): 2'-deoxy-2'-fluoro
  misc_feature (7)..(11): 2'-O-methyl
  misc_feature (12)..(12): 2'-deoxy-2'-fluoro
  misc_feature (13)..(13): 2'-O-methyl
  misc_feature (14)..(14): 2'-deoxy-2'-fluoro
  misc_feature (15)..(15): 2'-O-methyl
  misc_feature (16)..(19): 2'-deoxy-2'-fluoro
  misc_feature (20)..(20): n is thymidine
  misc_feature (21)..(21): 3'-3 attached terminal deoxyabasic moiety
cagagugaggauguguuuunn

SEQ ID NO: 1877 - RNA, 21 nt, Artificial Sequence
  Description of Artificial Sequence:  siNA sense region
  misc_feature (1)..(1): 5'-3 attached terminal deoxyabasic moiety
  misc_feature (1)..(3): 2'-deoxy-2'-fluoro
  misc_feature (4)..(4): 2'-O-methyl
  misc_feature (5)..(5): 2'-deoxy-2'-fluoro
  misc_feature (6)..(6): 2'-O-methyl
  misc_feature (7)..(8): 2'-deoxy-2'-fluoro
  misc_feature (9)..(9): 2'-O-methyl
  misc_feature (10)..(13): 2'-deoxy-2'-fluoro
  misc_feature (14)..(15): 2'-O-methyl
  misc_feature (16)..(17): 2'-deoxy-2'-fluoro
  misc_feature (18)..(19): 2'-O-methyl
  misc_feature (20)..(20): n is thymidine
  misc_feature (21)..(21): 3'-3 attached terminal deoxyabasic moiety
cccaugucaccucagcugann

SEQ ID NO: 1878 - RNA, 21 nt, Artificial Sequence
  Description of Artificial Sequence:  siNA sense region
  misc_feature (1)..(1): 5'-3 attached terminal deoxyabasic moiety
  misc_feature (1)..(5): 2'-O-methyl
  misc_feature (6)..(12): 2'-deoxy-2'-fluoro
  misc_feature (13)..(14): 2'-O-methyl
  misc_feature (15)..(15): 2'-deoxy-2'-fluoro
  misc_feature (16)..(17): 2'-O-methyl
  misc_feature (18)..(19): 2'-deoxy-2'-fluoro
  misc_feature (20)..(20): n is thymidine
  misc_feature (21)..(21): 3'-3 attached terminal deoxyabasic moiety
aagggucuucuuggcagcunn

SEQ ID NO: 1879 - RNA, 21 nt, Artificial Sequence
  Description of Artificial Sequence:  siNA sense region
  misc_feature (1)..(1): 5'-3 attached terminal deoxyabasic moiety
  misc_feature (1)..(1): 2'-O-methyl
  misc_feature (2)..(5): 2'-deoxy-2'-fluoro
  misc_feature (6)..(8): 2'-O-methyl
  misc_feature (9)..(10): 2'-deoxy-2'-fluoro
  misc_feature (11)..(14): 2'-O-methyl
  misc_feature (15)..(19): 2'-deoxy-2'-fluoro
  misc_feature (20)..(20): n is thymidine
  misc_feature (21)..(21): 3'-3 attached terminal deoxyabasic moiety
acucuaagcuggagcucuunn

SEQ ID NO: 1880 - RNA, 21 nt, Artificial Sequence
  Description of Artificial Sequence:  siNA sense region
  misc_feature (1)..(1): 5'-3 attached terminal deoxyabasic moiety
  misc_feature (1)..(2): 2'-O-methyl
  misc_feature (3)..(4): 2'-deoxy-'-fluoro
  misc_feature (5)..(5): 2'-O-methyl
  misc_feature (6)..(6): 2'-deoxy-'-fluoro
  misc_feature (7)..(8): 2'-O-methyl
  misc_feature (9)..(10): 2'-deoxy-'-fluoro
  misc_feature (11)..(12): 2'-O-methyl
  misc_feature (13)..(14): 2'-deoxy-'-fluoro
  misc_feature (15)..(15): 2'-O-methyl
  misc_feature (16)..(16): 2'-deoxy-'-fluoro
  misc_feature (17)..(17): 2'-O-methyl
  misc_feature (18)..(19): 2'-deoxy-'-fluoro
  misc_feature (20)..(20): n is thymidine
  misc_feature (21)..(21): 3'-3 attached terminal deoxyabasic moiety
ggcuguaaucaguuaugccnn

SEQ ID NO: 1881 - RNA, 21 nt, Artificial Sequence
  Description of Artificial Sequence:  siNA sense region
  misc_feature (1)..(1): 2'-O-methyl
  misc_feature (2)..(2): 2'-deoxy-2'-fluoro
  misc_feature (3)..(4): 2'-O-methyl
  misc_feature (5)..(5): 2'-deoxy-2'-fluoro
  misc_feature (6)..(6): 2'-O-methyl
  misc_feature (7)..(8): 2'-deoxy-2'-fluoro
  misc_feature (9)..(11): 2'-O-methyl
  misc_feature (12)..(12): 2'-deoxy-2'-fluoro
  misc_feature (13)..(16): 2'-O-methyl
  misc_feature (17)..(17): 2'-deoxy-2'-fluoro
  misc_feature (18)..(19): 2'-O-methyl
  misc_feature (20)..(21): internucleotide phosphorothioate linkage
gugguacugagcaaaguagnn

SEQ ID NO: 1882 - RNA, 21 nt, Artificial Sequence
  Description of Artificial Sequence:  siNA sense region
  misc_feature (1)..(1): 2'-O-methyl
  misc_feature (2)..(8): 2'-deoxy-2'-fluoro
  misc_feature (9)..(9): 2'-O-methyl
  misc_feature (10)..(10): 2'-deoxy-2'-fluoro
  misc_feature (11)..(15): 2'-O-methyl
  misc_feature (16)..(16): 2'-deoxy-2'-fluoro
  misc_feature (17)..(19): 2'-O-methyl
  misc_feature (20)..(21): internucleotide phosphorothioate linkage
acccucccacaaagacagann

SEQ ID NO: 1883 - RNA, 21 nt, Artificial Sequence
  Description of Artificial Sequence:  siNA sense region
  misc_feature (1)..(2): 2'-O-methyl
  misc_feature (3)..(3): 2'-deoxy-2'-fluoro
  misc_feature (4)..(4): 2'-O-methyl
  misc_feature (5)..(5): 2'-deoxy-2'-fluoro
  misc_feature (6)..(6): 2'-O-methyl
  misc_feature (7)..(7): 2'-deoxy-2'-fluoro
  misc_feature (8)..(12): 2'-O-methyl
  misc_feature (13)..(14): 2'-deoxy-2'-fluoro
  misc_feature (15)..(16): 2'-O-methyl
  misc_feature (17)..(18): 2'-deoxy-2'-fluoro
  misc_feature (19)..(19): 2'-O-methyl
  misc_feature (20)..(21): internucleotide phosphorothioate linkage
agugcacagaagccaguugnn

SEQ ID NO: 1884 - RNA, 21 nt, Artificial Sequence
  Description of Artificial Sequence:  siNA sense region
  misc_feature (1)..(4): 2'-O-methyl
  misc_feature (5)..(5): 2'-deoxy-2'-fluoro
  misc_feature (6)..(6): 2'-O-methyl
  misc_feature (7)..(7): 2'-deoxy-2'-fluoro
  misc_feature (8)..(8): 2'-O-methyl
  misc_feature (9)..(13): 2'-deoxy-2'-fluoro
  misc_feature (14)..(14): 2'-O-methyl
  misc_feature (15)..(18): 2'-deoxy-2'-fluoro
  misc_feature (19)..(19): 2'-O-methyl
  misc_feature (20)..(21): internucleotide phosphorothioate linkage
aaaacacauccucacucugnn

SEQ ID NO: 1885 - RNA, 21 nt, Artificial Sequence
  Description of Artificial Sequence:  siNA sense region
  misc_feature (1)..(2): 2'-deoxy-2'-fluoro
  misc_feature (3)..(4): 2'-O-methyl
  misc_feature (5)..(6): 2'-deoxy-2'-fluoro
  misc_feature (7)..(10): 2'-O-methyl
  misc_feature (11)..(11): 2'-deoxy-2'-fluoro
  misc_feature (12)..(13): 2'-O-methyl
  misc_feature (14)..(14): 2'-deoxy-2'-fluoro
  misc_feature (15)..(15): 2'-O-methyl
  misc_feature (16)..(16): 2'-deoxy-2'-fluoro
  misc_feature (17)..(19): 2'-O-methyl
  misc_feature (20)..(21): internucleotide phosphorothioate linkage
ucagcugaggugacaugggnn

SEQ ID NO: 1886 - RNA, 21 nt, Artificial Sequence
  Description of Artificial Sequence:  siNA sense region
  misc_feature (1)..(2): 2'-O-methyl
  misc_feature (3)..(4): 2'-deoxy-2'-fluoro
  misc_feature (5)..(5): 2'-O-methyl
  misc_feature (6)..(7): 2'-deoxy-2'-fluoro
  misc_feature (8)..(14): 2'-O-methyl
  misc_feature (15)..(19): 2'-deoxy-2'-fluoro
  misc_feature (20)..(21): internucleotide phosphorothioate linkage
agcugccaagaagacccuunn

SEQ ID NO: 1887 - RNA, 21 nt, Artificial Sequence
  Description of Artificial Sequence:  siNA sense region
  misc_feature (1)..(5): 2'-O-methyl
  misc_feature (6)..(9): 2'-deoxy-2'-fluoro
  misc_feature (10)..(11): 2'-O-methyl
  misc_feature (12)..(14): 2'-deoxy-2'-fluoro
  misc_feature (15)..(18): 2'-O-methyl
  misc_feature (19)..(19): 2'-deoxy-2'-fluoro
  misc_feature (20)..(21): internucleotide phosphorothioate linkage
aagagcuccagcuuagagunn

SEQ ID NO: 1888 - RNA, 21 nt, Artificial Sequence
  Description of Artificial Sequence:  siNA sense region
  misc_feature (1)..(2): 2'-O-methyl
  misc_feature (3)..(3): 2'-deoxy-2'-fluoro
  misc_feature (4)..(4): 2'-O-methyl
  misc_feature (5)..(5): 2'-deoxy-2'-fluoro
  misc_feature (6)..(7): 2'-O-methyl
  misc_feature (8)..(9): 2'-deoxy-2'-fluoro
  misc_feature (10)..(11): 2'-O-methyl
  misc_feature (12)..(13): 2'-deoxy-2'-fluoro
  misc_feature (14)..(14): 2'-O-methyl
  misc_feature (15)..(15): 2'-deoxy-2'-fluoro
  misc_feature (16)..(17): 2'-O-methyl
  misc_feature (18)..(19): 2'-deoxy-2'-fluoro
  misc_feature (20)..(21): internucleotide phosphorothioate linkage
ggcauaacugauuacagccnn

SEQ ID NO: 1889 - RNA, 21 nt, Artificial Sequence
  Description of Artificial Sequence:  siNA sense region
  misc_feature (1)..(1): 5'-3 attached terminal deoxyabasic moiety
  misc_feature (20)..(20): n is thymidine
  misc_feature (21)..(21): 3'-3 attached terminal deoxyabasic moiety
cuacuuugcucaguaccacnn

SEQ ID NO: 1890 - RNA, 21 nt, Artificial Sequence
  Description of Artificial Sequence:  siNA sense region
  misc_feature (1)..(1): 5'-3 attached terminal deoxyabasic moiety
  misc_feature (20)..(20): n is thymidine
  misc_feature (21)..(21): 3'-3 attached terminal deoxyabasic moiety
ucugucuuugugggagggunn

SEQ ID NO: 1891 - RNA, 21 nt, Artificial Sequence
  Description of Artificial Sequence:  siNA sense region
  misc_feature (1)..(1): 5'-3 attached terminal deoxyabasic moiety
  misc_feature (20)..(20): n is thymidine
  misc_feature (21)..(21): 3'-3 attached terminal deoxyabasic moiety
caacuggcuucugugcacunn

SEQ ID NO: 1892 - RNA, 21 nt, Artificial Sequence
  Description of Artificial Sequence:  siNA sense region
  misc_feature (1)..(1): 5'-3 attached terminal deoxyabasic moiety
  misc_feature (20)..(20): n is thymidine
  misc_feature (21)..(21): 3'-3 attached terminal deoxyabasic moiety
cagagugaggauguguuuunn

SEQ ID NO: 1893 - RNA, 21 nt, Artificial Sequence
  Description of Artificial Sequence:  siNA sense region
  misc_feature (1)..(1): 5'-3 attached terminal deoxyabasic moiety
  misc_feature (20)..(20): n is thymidine
  misc_feature (21)..(21): 3'-3 attached terminal deoxyabasic moiety
cccaugucaccucagcugann

SEQ ID NO: 1894 - RNA, 21 nt, Artificial Sequence
  Description of Artificial Sequence:  siNA sense region
  misc_feature (1)..(1): 5'-3 attached terminal deoxyabasic moiety
  misc_feature (20)..(20): n is thymidine
  misc_feature (21)..(21): 3'-3 attached terminal deoxyabasic moiety
aagggucuucuuggcagcunn

SEQ ID NO: 1895 - RNA, 21 nt, Artificial Sequence
  Description of Artificial Sequence:  siNA sense region
  misc_feature (1)..(1): 5'-3 attached terminal deoxyabasic moiety
  misc_feature (20)..(20): n is thymidine
  misc_feature (21)..(21): 3'-3 attached terminal deoxyabasic moiety
acucuaagcuggagcucuunn

SEQ ID NO: 1896 - RNA, 21 nt, Artificial Sequence
  Description of Artificial Sequence:  siNA sense region
  misc_feature (1)..(1): 5'-3 attached terminal deoxyabasic moiety
  misc_feature (20)..(20): n is thymidine
  misc_feature (21)..(21): 3'-3 attached terminal deoxyabasic moiety
ggcuguaaucaguuaugccnn

SEQ ID NO: 1897 - RNA, 21 nt, Artificial Sequence
  Description of Artificial Sequence:  siNA sense region
  misc_feature (20)..(21): internucleotide phosphorothioate linkage
gugguacugagcaaaguagnn

SEQ ID NO: 1898 - RNA, 21 nt, Artificial Sequence
  Description of Artificial Sequence:  siNA sense region
  misc_feature (20)..(21): internucleotide phosphorothioate linkage
acccucccacaaagacagann

SEQ ID NO: 1899 - RNA, 21 nt, Artificial Sequence
  Description of Artificial Sequence:  siNA sense region
  misc_feature (20)..(21): internucleotide phosphorothioate linkage
agugcacagaagccaguugnn

SEQ ID NO: 1900 - RNA, 21 nt, Artificial Sequence
  Description of Artificial Sequence:  siNA sense region
  misc_feature (20)..(21): internucleotide phosphorothioate linkage
aaaacacauccucacucugnn

SEQ ID NO: 1901 - RNA, 21 nt, Artificial Sequence
  Description of Artificial Sequence:  siNA sense region
  misc_feature (20)..(21): internucleotide phosphorothioate linkage
ucagcugaggugacaugggnn

SEQ ID NO: 1902 - RNA, 21 nt, Artificial Sequence
  Description of Artificial Sequence:  siNA sense region
  misc_feature (20)..(21): internucleotide phosphorothioate linkage
agcugccaagaagacccuunn

SEQ ID NO: 1903 - RNA, 21 nt, Artificial Sequence
  Description of Artificial Sequence:  siNA sense region
  misc_feature (20)..(21): internucleotide phosphorothioate linkage
aagagcuccagcuuagagunn

SEQ ID NO: 1904 - RNA, 21 nt, Artificial Sequence
  Description of Artificial Sequence:  siNA sense region
  misc_feature (20)..(21): internucleotide phosphorothioate linkage
ggcauaacugauuacagccnn

SEQ ID NO: 1905 - RNA, 21 nt, Artificial Sequence
  Description of Artificial Sequence:  siNA sense region
  misc_feature (1)..(1): 2'-O-methyl
  misc_feature (2)..(2): 2'-deoxy-2'-fluoro
  misc_feature (3)..(4): 2'-O-methyl
  misc_feature (5)..(5): 2'-deoxy-2'-fluoro
  misc_feature (6)..(6): 2'-O-methyl
  misc_feature (9)..(11): 2'-O-methyl
  misc_feature (9)..(8): 2'-deoxy-2'-fluoro
  misc_feature (12)..(12): 2'-deoxy-2'-fluoro
  misc_feature (13)..(16): 2'-O-methyl
  misc_feature (17)..(17): 2'-deoxy-2'-fluoro
  misc_feature (18)..(19): 2'-O-methyl
  misc_feature (20)..(20): n is thymidine
  misc_feature (21)..(21): 3'-3 attached terminal deoxyabasic moiety
gugguacugagcaaaguagnn

SEQ ID NO: 1906 - RNA, 21 nt, Artificial Sequence
  Description of Artificial Sequence:  siNA sense region
  misc_feature (1)..(1): 2'-O-methyl
  misc_feature (2)..(8): 2'-deoxy-2'-fluoro
  misc_feature (9)..(9): 2'-O-methyl
  misc_feature (10)..(10): 2'-deoxy-2'-fluoro
  misc_feature (11)..(15): 2'-O-methyl
  misc_feature (16)..(16): 2'-deoxy-2'-fluoro
  misc_feature (17)..(19): 2'-O-methyl
  misc_feature (20)..(20): n is thymidine
  misc_feature (21)..(21): 5'-3 attached terminal deoxyabasic moiety
acccucccacaaagacagann

SEQ ID NO: 1907 - RNA, 21 nt, Artificial Sequence
  Description of Artificial Sequence:  siNA sense region
  misc_feature (1)..(2): 2'-O-methyl
  misc_feature (3)..(3): 2'-deoxy-2'-fluoro
  misc_feature (4)..(4): 2'-O-methyl
  misc_feature (5)..(5): 2'-deoxy-2'-fluoro
  misc_feature (6)..(6): 2'-O-methyl
  misc_feature (7)..(7): 2'-deoxy-2'-fluoro
  misc_feature (8)..(12): 2'-O-methyl
  misc_feature (13)..(14): 2'-deoxy-2'-fluoro
  misc_feature (15)..(16): 2'-O-methyl
  misc_feature (17)..(18): 2'-deoxy-2'-fluoro
  misc_feature (19)..(19): 2'-O-methyl
  misc_feature (20)..(20): n is thymidine
  misc_feature (21)..(21): 3'-3 attached terminal deoxyabasic moiety
agugcacagaagccaguugnn

SEQ ID NO: 1908 - RNA, 21 nt, Artificial Sequence
  Description of Artificial Sequence:  siNA sense region
  misc_feature (1)..(4): 2'-O-methyl
  misc_feature (5)..(5): 2'-deoxy-2'-fluoro
  misc_feature (6)..(6): 2'-O-methyl
  misc_feature (7)..(7): 2'-deoxy-2'-fluoro
  misc_feature (8)..(8): 2'-O-methyl
  misc_feature (9)..(13): 2'-deoxy-2'-fluoro
  misc_feature (14)..(14): 2'-O-methyl
  misc_feature (15)..(18): 2'-deoxy-2'-fluoro
  misc_feature (19)..(19): 2'-O-methyl
  misc_feature (20)..(20): n is thymidine
  misc_feature (21)..(21): 3'-3 attached terminal deoxyabasic moiety
aaaacacauccucacucugnn

SEQ ID NO: 1909 - RNA, 21 nt, Artificial Sequence
  Description of Artificial Sequence:  siNA sense region
  misc_feature (1)..(2): 2'-deoxy-2'-fluoro
  misc_feature (3)..(4): 2'-O-methyl
  misc_feature (5)..(6): 2'-deoxy-2'-fluoro
  misc_feature (7)..(10): 2'-O-methyl
  misc_feature (11)..(11): 2'-deoxy-2'-fluoro
  misc_feature (12)..(13): 2'-O-methyl
  misc_feature (14)..(14): 2'-deoxy-2'-fluoro
  misc_feature (15)..(15): 2'-O-methyl
  misc_feature (16)..(16): 2'-deoxy-2'-fluoro
  misc_feature (17)..(19): 2'-O-methyl
  misc_feature (20)..(20): n is thymidine
  misc_feature (21)..(21): 3'-3 attached terminal deoxyabasic moiety
ucagcugaggugacaugggnn

SEQ ID NO: 1910 - RNA, 21 nt, Artificial Sequence
  Description of Artificial Sequence:  siNA sense region
  misc_feature (1)..(2): 2'-O-methyl
  misc_feature (3)..(4): 2'-deoxy-2'-fluoro
  misc_feature (5)..(5): 2'-O-methyl
  misc_feature (6)..(7): 2'-deoxy-2'-fluoro
  misc_feature (8)..(14): 2'-O-methyl
  misc_feature (15)..(19): 2'-deoxy-2'-fluoro
  misc_feature (20)..(20): n is thymidine
  misc_feature (21)..(21): 3'-3 attached terminal deoxyabasic moiety
agcugccaagaagacccuunn

SEQ ID NO: 1911 - RNA, 21 nt, Artificial Sequence
  Description of Artificial Sequence:  siNA sense region
  misc_feature (1)..(5): 2'-O-methyl
  misc_feature (6)..(9): 2'-deoxy-2'-fluoro
  misc_feature (10)..(11): 2'-O-methyl
  misc_feature (12)..(13): 2'-deoxy-2'-fluoro
  misc_feature (15)..(18): 2'-O-methyl
  misc_feature (19)..(19): 2'-deoxy-2'-fluoro
  misc_feature (20)..(20): n is thymidine
  misc_feature (21)..(21): 3'-3 attached terminal deoxyabasic moiety
aagagcuccagcuuagagunn

SEQ ID NO: 1912 - RNA, 21 nt, Artificial Sequence
  Description of Artificial Sequence:  siNA sense region
  misc_feature (1)..(2): 2'-O-methyl
  misc_feature (3)..(3): 2'-deoxy-2'-fluoro
  misc_feature (4)..(4): 2'-O-methyl
  misc_feature (5)..(5): 2'-deoxy-2'-fluoro
  misc_feature (6)..(7): 2'-O-methyl
  misc_feature (8)..(9): 2'-deoxy-2'-fluoro
  misc_feature (10)..(11): 2'-O-methyl
  misc_feature (12)..(13): 2'-deoxy-2'-fluoro
  misc_feature (14)..(14): 2'-O-methyl
  misc_feature (15)..(15): 2'-deoxy-2'-fluoro
  misc_feature (16)..(17): 2'-O-methyl
  misc_feature (18)..(19): 2'-deoxy-2'-fluoro
  misc_feature (20)..(20): n is thymidine
  misc_feature (21)..(21): 3'-3 attached terminal deoxyabasic moiety
ggcauaacugauuacagccnn

SEQ ID NO: 1913 - RNA, 21 nt, Artificial Sequence
  Description of Artificial Sequence:  siNA sense region
  misc_feature (20)..(20): n is thymidine
  misc_feature (21)..(21): 3'-3 attached terminal deoxyabasic moiety
gugguacugagcaaaguagnn

SEQ ID NO: 1914 - RNA, 21 nt, Artificial Sequence
  Description of Artificial Sequence:  siNA sense region
  misc_feature (20)..(20): n is thymidine
  misc_feature (21)..(21): 3'-3 attached terminal deoxyabasic moiety
acccucccacaaagacagann

SEQ ID NO: 1915 - RNA, 21 nt, Artificial Sequence
  Description of Artificial Sequence:  siNA sense region
  misc_feature (20)..(20): n is thymidine
  misc_feature (21)..(21): 3'-3 attached terminal deoxyabasic moiety
agugcacagaagccaguugnn

SEQ ID NO: 1916 - RNA, 21 nt, Artificial Sequence
  Description of Artificial Sequence:  siNA sense region
  misc_feature (20)..(20): n is thymidine
  misc_feature (21)..(21): 3'-3 attached terminal deoxyabasic moiety
aaaacacauccucacucugnn

SEQ ID NO: 1917 - RNA, 21 nt, Artificial Sequence
  Description of Artificial Sequence:  siNA sense region
  misc_feature (20)..(20): n is thymidine
  misc_feature (21)..(21): 3'-3 attached terminal deoxyabasic moiety
ucagcugaggugacaugggnn

SEQ ID NO: 1918 - RNA, 21 nt, Artificial Sequence
  Description of Artificial Sequence:  siNA sense region
  misc_feature (20)..(20): n is thymidine
  misc_feature (21)..(21): 3'-3 attached terminal deoxyabasic moiety
agcugccaagaagacccuunn

SEQ ID NO: 1919 - RNA, 21 nt, Artificial Sequence
  Description of Artificial Sequence:  siNA sense region
  misc_feature (20)..(20): n is thymidine
  misc_feature (21)..(21): 3'-3 attached terminal deoxyabasic moiety
aagagcuccagcuuagagunn

SEQ ID NO: 1920 - RNA, 21 nt, Artificial Sequence
  Description of Artificial Sequence:  siNA sense region
  misc_feature (20)..(20): n is thymidine
  misc_feature (21)..(21): 3'-3 attached terminal deoxyabasic moiety
ggcauaacugauuacagccnn

SEQ ID NO: 1921 - RNA, 21 nt, Artificial Sequence
  Description of Artificial Sequence:  siNA sense region
  misc_feature (20)..(21): n is thymidine
ugaccgcgacuuuucaaagnn

SEQ ID NO: 1922 - RNA, 21 nt, Artificial Sequence
  Description of Artificial Sequence:  siNA sense region
  misc_feature (20)..(21): n is thymidine
aaccucagcaacuucaaccnn

SEQ ID NO: 1923 - RNA, 21 nt, Artificial Sequence
  Description of Artificial Sequence:  siNA sense region
  misc_feature (20)..(21): n is thymidine
accucagcaacuucaacccnn

SEQ ID NO: 1924 - RNA, 21 nt, Artificial Sequence
  Description of Artificial Sequence:  siNA sense region
  misc_feature (20)..(21): n is thymidine
gaaaaagugaaaaccuugann

SEQ ID NO: 1925 - RNA, 21 nt, Artificial Sequence
  Description of Artificial Sequence:  siNA sense region
  misc_feature (20)..(21): n is thymidine
aaaaagugaaaaccuugaann

SEQ ID NO: 1926 - RNA, 21 nt, Artificial Sequence
  Description of Artificial Sequence:  siNA sense region
  misc_feature (20)..(21): n is thymidine
cagggaacagguggcacagnn

SEQ ID NO: 1927 - RNA, 21 nt, Artificial Sequence
  Description of Artificial Sequence:  siNA sense region
  misc_feature (20)..(21): n is thymidine
agaaagucaugaaccacgunn

SEQ ID NO: 1928 - RNA, 21 nt, Artificial Sequence
  Description of Artificial Sequence:  siNA sense region
  misc_feature (20)..(21): n is thymidine
gaaagucaugaaccacguunn

SEQ ID NO: 1929 - RNA, 21 nt, Artificial Sequence
  Description of Artificial Sequence:  siNA sense region
  misc_feature (20)..(21): n is thymidine
aagucaugaaccacguuaann

SEQ ID NO: 1930 - RNA, 21 nt, Artificial Sequence
  Description of Artificial Sequence:  siNA sense region
  misc_feature (20)..(21): n is thymidine
ucaugaaccacguuaacagnn

SEQ ID NO: 1931 - RNA, 21 nt, Artificial Sequence
  Description of Artificial Sequence:  siNA sense region
  misc_feature (20)..(21): n is thymidine
agugggugccaacucaugcnn

SEQ ID NO: 1932 - RNA, 21 nt, Artificial Sequence
  Description of Artificial Sequence:  siNA sense region
  misc_feature (20)..(21): n is thymidine
ugccaacucaugcuaacgcnn

SEQ ID NO: 1933 - RNA, 21 nt, Artificial Sequence
  Description of Artificial Sequence:  siNA sense region
  misc_feature (20)..(21): n is thymidine
gccaacucaugcuaacgcann

SEQ ID NO: 1934 - RNA, 21 nt, Artificial Sequence
  Description of Artificial Sequence:  siNA sense region
  misc_feature (20)..(21): n is thymidine
caacucaugcuaacgcagcnn

SEQ ID NO: 1935 - RNA, 21 nt, Artificial Sequence
  Description of Artificial Sequence:  siNA sense region
  misc_feature (20)..(21): n is thymidine
aacucaugcuaacgcagcann

SEQ ID NO: 1936 - RNA, 21 nt, Artificial Sequence
  Description of Artificial Sequence:  siNA sense region
  misc_feature (20)..(21): n is thymidine
acucaugcuaacgcagcagnn

SEQ ID NO: 1937 - RNA, 21 nt, Artificial Sequence
  Description of Artificial Sequence:  siNA sense region
  misc_feature (20)..(21): n is thymidine
cauugaccaagaacugcaunn

SEQ ID NO: 1938 - RNA, 21 nt, Artificial Sequence
  Description of Artificial Sequence:  siNA sense region
  misc_feature (20)..(21): n is thymidine
auugaccaagaacugcaugnn

SEQ ID NO: 1939 - RNA, 21 nt, Artificial Sequence
  Description of Artificial Sequence:  siNA sense region
  misc_feature (20)..(21): n is thymidine
uugaccaagaacugcauggnn

SEQ ID NO: 1940 - RNA, 21 nt, Artificial Sequence
  Description of Artificial Sequence:  siNA sense region
  misc_feature (20)..(21): n is thymidine
ugaccaagaacugcauggann

SEQ ID NO: 1941 - RNA, 21 nt, Artificial Sequence
  Description of Artificial Sequence:  siNA sense region
  misc_feature (20)..(21): n is thymidine
accaagaacugcauggaccnn

SEQ ID NO: 1942 - RNA, 21 nt, Artificial Sequence
  Description of Artificial Sequence:  siNA sense region
  misc_feature (20)..(21): n is thymidine
caagaacugcauggaccuann

SEQ ID NO: 1943 - RNA, 21 nt, Artificial Sequence
  Description of Artificial Sequence:  siNA sense region
  misc_feature (20)..(21): n is thymidine
agaacugcauggaccuaacnn

SEQ ID NO: 1944 - RNA, 21 nt, Artificial Sequence
  Description of Artificial Sequence:  siNA sense region
  misc_feature (20)..(21): n is thymidine
aacugcauggaccuaacaunn

SEQ ID NO: 1945 - RNA, 21 nt, Artificial Sequence
  Description of Artificial Sequence:  siNA sense region
  misc_feature (20)..(21): n is thymidine
acugcauggaccuaacauunn

SEQ ID NO: 1946 - RNA, 21 nt, Artificial Sequence
  Description of Artificial Sequence:  siNA sense region
  misc_feature (20)..(21): n is thymidine
cugcauggaccuaacauucnn

SEQ ID NO: 1947 - RNA, 21 nt, Artificial Sequence
  Description of Artificial Sequence:  siNA sense region
  misc_feature (20)..(21): n is thymidine
gcauggaccuaacauucgann

SEQ ID NO: 1948 - RNA, 21 nt, Artificial Sequence
  Description of Artificial Sequence:  siNA sense region
  misc_feature (20)..(21): n is thymidine
auggaccuaacauucgaucnn

SEQ ID NO: 1949 - RNA, 21 nt, Artificial Sequence
  Description of Artificial Sequence:  siNA sense region
  misc_feature (20)..(21): n is thymidine
cuuugaaaagucgcggucann

SEQ ID NO: 1950 - RNA, 21 nt, Artificial Sequence
  Description of Artificial Sequence:  siNA sense region
  misc_feature (20)..(21): n is thymidine
gguugaaguugcugagguunn

SEQ ID NO: 1951 - RNA, 21 nt, Artificial Sequence
  Description of Artificial Sequence:  siNA sense region
  misc_feature (20)..(21): n is thymidine
ggguugaaguugcugaggunn

SEQ ID NO: 1952 - RNA, 21 nt, Artificial Sequence
  Description of Artificial Sequence:  siNA sense region
  misc_feature (20)..(21): n is thymidine
ucaagguuuucacuuuuucnn

SEQ ID NO: 1953 - RNA, 21 nt, Artificial Sequence
  Description of Artificial Sequence:  siNA sense region
  misc_feature (20)..(21): n is thymidine
uucaagguuuucacuuuuunn

SEQ ID NO: 1954 - RNA, 21 nt, Artificial Sequence
  Description of Artificial Sequence:  siNA sense region
  misc_feature (20)..(21): n is thymidine
cugugccaccuguucccugnn

SEQ ID NO: 1955 - RNA, 21 nt, Artificial Sequence
  Description of Artificial Sequence:  siNA sense region
  misc_feature (20)..(21): n is thymidine
acgugguucaugacuuucunn

SEQ ID NO: 1956 - RNA, 21 nt, Artificial Sequence
  Description of Artificial Sequence:  siNA sense region
  misc_feature (20)..(21): n is thymidine
aacgugguucaugacuuucnn

SEQ ID NO: 1957 - RNA, 21 nt, Artificial Sequence
  Description of Artificial Sequence:  siNA sense region
  misc_feature (20)..(21): n is thymidine
uuaacgugguucaugacuunn

SEQ ID NO: 1958 - RNA, 21 nt, Artificial Sequence
  Description of Artificial Sequence:  siNA sense region
  misc_feature (20)..(21): n is thymidine
cuguuaacgugguucaugann

SEQ ID NO: 1959 - RNA, 21 nt, Artificial Sequence
  Description of Artificial Sequence:  siNA sense region
  misc_feature (20)..(21): n is thymidine
gcaugaguuggcacccacunn

SEQ ID NO: 1960 - RNA, 21 nt, Artificial Sequence
  Description of Artificial Sequence:  siNA sense region
  misc_feature (20)..(21): n is thymidine
gcguuagcaugaguuggcann

SEQ ID NO: 1961 - RNA, 21 nt, Artificial Sequence
  Description of Artificial Sequence:  siNA sense region
  misc_feature (20)..(21): n is thymidine
ugcguuagcaugaguuggcnn

SEQ ID NO: 1962 - RNA, 21 nt, Artificial Sequence
  Description of Artificial Sequence:  siNA sense region
  misc_feature (20)..(21): n is thymidine
gcugcguuagcaugaguugnn

SEQ ID NO: 1963 - RNA, 21 nt, Artificial Sequence
  Description of Artificial Sequence:  siNA sense region
  misc_feature (20)..(21): n is thymidine
ugcugcguuagcaugaguunn

SEQ ID NO: 1964 - RNA, 21 nt, Artificial Sequence
  Description of Artificial Sequence:  siNA sense region
  misc_feature (20)..(21): n is thymidine
cugcugcguuagcaugagunn

SEQ ID NO: 1965 - RNA, 21 nt, Artificial Sequence
  Description of Artificial Sequence:  siNA sense region
  misc_feature (20)..(21): n is thymidine
augcaguucuuggucaaugnn

SEQ ID NO: 1966 - RNA, 21 nt, Artificial Sequence
  Description of Artificial Sequence:  siNA sense region
  misc_feature (20)..(21): n is thymidine
caugcaguucuuggucaaunn

SEQ ID NO: 1967 - RNA, 21 nt, Artificial Sequence
  Description of Artificial Sequence:  siNA sense region
  misc_feature (20)..(21): n is thymidine
ccaugcaguucuuggucaann

SEQ ID NO: 1968 - RNA, 21 nt, Artificial Sequence
  Description of Artificial Sequence:  siNA sense region
  misc_feature (20)..(21): n is thymidine
uccaugcaguucuuggucann

SEQ ID NO: 1969 - RNA, 21 nt, Artificial Sequence
  Description of Artificial Sequence:  siNA sense region
  misc_feature (20)..(21): n is thymidine
gguccaugcaguucuuggunn

SEQ ID NO: 1970 - RNA, 21 nt, Artificial Sequence
  Description of Artificial Sequence:  siNA sense region
  misc_feature (20)..(21): n is thymidine
uagguccaugcaguucuugnn

SEQ ID NO: 1971 - RNA, 21 nt, Artificial Sequence
  Description of Artificial Sequence:  siNA sense region
  misc_feature (20)..(21): n is thymidine
guuagguccaugcaguucunn

SEQ ID NO: 1972 - RNA, 21 nt, Artificial Sequence
  Description of Artificial Sequence:  siNA sense region
  misc_feature (20)..(21): n is thymidine
auguuagguccaugcaguunn

SEQ ID NO: 1973 - RNA, 21 nt, Artificial Sequence
  Description of Artificial Sequence:  siNA sense region
  misc_feature (20)..(21): n is thymidine
aauguuagguccaugcagunn

SEQ ID NO: 1974 - RNA, 21 nt, Artificial Sequence
  Description of Artificial Sequence:  siNA sense region
  misc_feature (20)..(21): n is thymidine
gaauguuagguccaugcagnn

SEQ ID NO: 1975 - RNA, 21 nt, Artificial Sequence
  Description of Artificial Sequence:  siNA sense region
  misc_feature (20)..(21): n is thymidine
ucgaauguuagguccaugcnn

SEQ ID NO: 1976 - RNA, 21 nt, Artificial Sequence
  Description of Artificial Sequence:  siNA sense region
  misc_feature (20)..(21): n is thymidine
gaucgaauguuagguccaunn

SEQ ID NO: 1977 - RNA, 21 nt, Artificial Sequence
  Description of Artificial Sequence:  siNA sense region
  misc_feature (1)..(1): 5'-3 attached terminal deoxyabasic moiety
  misc_feature (1)..(1): 2'-deoxy-2'-fluoro
  misc_feature (4)..(5): 2'-deoxy-2'-fluoro
  misc_feature (7)..(7): 2'-deoxy-2'-fluoro
  misc_feature (10)..(15): 2'-deoxy-2'-fluoro
  misc_feature (20)..(20): n is thymidine
  misc_feature (21)..(21): 3'-3 attached terminal deoxyabasic moiety
ugaccgcgacuuuucaaagnn

SEQ ID NO: 1978 - RNA, 21 nt, Artificial Sequence
  Description of Artificial Sequence:  siNA sense region
  misc_feature (1)..(1): 5'-3 attached terminal deoxyabasic moiety
  misc_feature (3)..(6): 2'-deoxy-2'-fluoro
  misc_feature (9)..(9): 2'-deoxy-2'-fluoro
  misc_feature (12)..(15): 2'-deoxy-2'-fluoro
  misc_feature (18)..(19): 2'-deoxy-2'-fluoro
  misc_feature (20)..(20): n is thymidine
  misc_feature (21)..(21): 3'-3 attached terminal deoxyabasic moiety
aaccucagcaacuucaaccnn

SEQ ID NO: 1979 - RNA, 21 nt, Artificial Sequence
  Description of Artificial Sequence:  siNA sense region
  misc_feature (1)..(1): 5'-3 attached terminal deoxyabasic moiety
  misc_feature (2)..(5): 2'-deoxy-2'-fluoro
  misc_feature (8)..(8): 2'-deoxy-2'-fluoro
  misc_feature (11)..(14): 2'-deoxy-2'-fluoro
  misc_feature (17)..(19): 2'-deoxy-2'-fluoro
  misc_feature (20)..(20): n is thymidine
  misc_feature (21)..(21): 3'-3 attached terminal deoxyabasic moiety
accucagcaacuucaacccnn

SEQ ID NO: 1980 - RNA, 21 nt, Artificial Sequence
  Description of Artificial Sequence:  siNA sense region
  misc_feature (1)..(1): 5'-3 attached terminal deoxyabasic moiety
  misc_feature (8)..(8): 2'-deoxy-2'-fluoro
  misc_feature (14)..(17): 2'-deoxy-2'-fluoro
  misc_feature (20)..(20): n is thymidine
  misc_feature (21)..(21): 3'-3 attached terminal deoxyabasic moiety
gaaaaagugaaaaccuugann

SEQ ID NO: 1981 - RNA, 21 nt, Artificial Sequence
  Description of Artificial Sequence:  siNA sense region
  misc_feature (1)..(1): 5'-3 attached terminal deoxyabasic moiety
  misc_feature (7)..(7): 2'-deoxy-2'-fluoro
  misc_feature (13)..(16): 2'-deoxy-2'-fluoro
  misc_feature (20)..(20): n is thymidine
  misc_feature (21)..(21): 3'-3 attached terminal deoxyabasic moiety
aaaaagugaaaaccuugaann

SEQ ID NO: 1982 - RNA, 21 nt, Artificial Sequence
  Description of Artificial Sequence:  siNA sense region
  misc_feature (1)..(1): 5'-3 attached terminal deoxyabasic moiety
  misc_feature (1)..(1): 2'-deoxy-2'-fluoro
  misc_feature (8)..(8): 2'-deoxy-2'-fluoro
  misc_feature (12)..(12): 2'-deoxy-2'-fluoro
  misc_feature (15)..(15): 2'-deoxy-2'-fluoro
  misc_feature (17)..(17): 2'-deoxy-2'-fluoro
  misc_feature (20)..(20): n is thymidine
  misc_feature (21)..(21): 3'-3 attached terminal deoxyabasic moiety
cagggaacagguggcacagnn

SEQ ID NO: 1983 - RNA, 21 nt, Artificial Sequence
  Description of Artificial Sequence:  siNA sense region
  misc_feature (1)..(1): 5'-3 attached terminal deoxyabasic moiety
  misc_feature (7)..(8): 2'-deoxy-2'-fluoro
  misc_feature (10)..(10): 2'-deoxy-2'-fluoro
  misc_feature (14)..(15): 2'-deoxy-2'-fluoro
  misc_feature (17)..(17): 2'-deoxy-2'-fluoro
  misc_feature (19)..(19): 2'-deoxy-2'-fluoro
  misc_feature (20)..(20): n is thymidine
  misc_feature (21)..(21): 3'-3 attached terminal deoxyabasic moiety
agaaagucaugaaccacgunn

SEQ ID NO: 1984 - RNA, 21 nt, Artificial Sequence
  Description of Artificial Sequence:  siNA sense region
  misc_feature (1)..(1): 5'-3 attached terminal deoxyabasic moiety
  misc_feature (6)..(7): 2'-deoxy-2'-fluoro
  misc_feature (9)..(9): 2'-deoxy-2'-fluoro
  misc_feature (13)..(14): 2'-deoxy-2'-fluoro
  misc_feature (16)..(16): 2'-deoxy-2'-fluoro
  misc_feature (18)..(19): 2'-deoxy-2'-fluoro
  misc_feature (20)..(20): n is thymidine
  misc_feature (21)..(21): 3'-3 attached terminal deoxyabasic moiety
gaaagucaugaaccacguunn

SEQ ID NO: 1985 - RNA, 21 nt, Artificial Sequence
  Description of Artificial Sequence:  siNA sense region
  misc_feature (1)..(1): 5'-3 attached terminal deoxyabasic moiety
  misc_feature (4)..(5): 2'-deoxy-2'-fluoro
  misc_feature (7)..(7): 2'-deoxy-2'-fluoro
  misc_feature (11)..(12): 2'-deoxy-2'-fluoro
  misc_feature (14)..(14): 2'-deoxy-2'-fluoro
  misc_feature (16)..(17): 2'-deoxy-2'-fluoro
  misc_feature (20)..(20): n is thymidine
  misc_feature (21)..(21): 3'-3 attached terminal deoxyabasic moiety
aagucaugaaccacguuaann

SEQ ID NO: 1986 - RNA, 21 nt, Artificial Sequence
  Description of Artificial Sequence:  siNA sense region
  misc_feature (1)..(1): 5'-3 attached terminal deoxyabasic moiety
  misc_feature (1)..(2): 2'-deoxy-2'-fluoro
  misc_feature (4)..(4): 2'-deoxy-2'-fluoro
  misc_feature (8)..(9): 2'-deoxy-2'-fluoro
  misc_feature (11)..(11): 2'-deoxy-2'-fluoro
  misc_feature (13)..(14): 2'-deoxy-2'-fluoro
  misc_feature (17)..(17): 2'-deoxy-2'-fluoro
  misc_feature (20)..(20): n is thymidine
  misc_feature (21)..(21): 3'-3 attached terminal deoxyabasic moiety
ucaugaaccacguuaacagnn

SEQ ID NO: 1987 - RNA, 21 nt, Artificial Sequence
  Description of Artificial Sequence:  siNA sense region
  misc_feature (1)..(1): 5'-3 attached terminal deoxyabasic moiety
  misc_feature (3)..(3): 2'-deoxy-2'-fluoro
  misc_feature (7)..(7): 2'-deoxy-2'-fluoro
  misc_feature (9)..(10): 2'-deoxy-2'-fluoro
  misc_feature (13)..(15): 2'-deoxy-2'-fluoro
  misc_feature (17)..(17): 2'-deoxy-2'-fluoro
  misc_feature (19)..(19): 2'-deoxy-2'-fluoro
  misc_feature (20)..(20): n is thymidine
  misc_feature (21)..(21): 3'-3 attached terminal deoxyabasic moiety
agugggugccaacucaugcnn

SEQ ID NO: 1988 - RNA, 21 nt, Artificial Sequence
  Description of Artificial Sequence:  siNA sense region
  misc_feature (1)..(1): 5'-3 attached terminal deoxyabasic moiety
  misc_feature (1)..(1): 2'-deoxy-2'-fluoro
  misc_feature (3)..(4): 2'-deoxy-2'-fluoro
  misc_feature (7)..(9): 2'-deoxy-2'-fluoro
  misc_feature (11)..(11): 2'-deoxy-2'-fluoro
  misc_feature (13)..(14): 2'-deoxy-2'-fluoro
  misc_feature (17)..(17): 2'-deoxy-2'-fluoro
  misc_feature (19)..(19): 2'-deoxy-2'-fluoro
  misc_feature (20)..(20): n is thymidine
  misc_feature (21)..(21): 3'-3 attached terminal deoxyabasic moiety
ugccaacucaugcuaacgcnn

SEQ ID NO: 1989 - RNA, 21 nt, Artificial Sequence
  Description of Artificial Sequence:  siNA sense region
  misc_feature (1)..(1): 5'-3 attached terminal deoxyabasic moiety
  misc_feature (2)..(3): 2'-deoxy-2'-fluoro
  misc_feature (6)..(8): 2'-deoxy-2'-fluoro
  misc_feature (10)..(10): 2'-deoxy-2'-fluoro
  misc_feature (12)..(13): 2'-deoxy-2'-fluoro
  misc_feature (16)..(16): 2'-deoxy-2'-fluoro
  misc_feature (18)..(18): 2'-deoxy-2'-fluoro
  misc_feature (20)..(20): n is thymidine
  misc_feature (21)..(21): 3'-3 attached terminal deoxyabasic moiety
gccaacucaugcuaacgcann

SEQ ID NO: 1990 - RNA, 21 nt, Artificial Sequence
  Description of Artificial Sequence:  siNA sense region
  misc_feature (1)..(1): 5'-3 attached terminal deoxyabasic moiety
  misc_feature (1)..(1): 2'-deoxy-2'-fluoro
  misc_feature (4)..(6): 2'-deoxy-2'-fluoro
  misc_feature (8)..(8): 2'-deoxy-2'-fluoro
  misc_feature (10)..(11): 2'-deoxy-2'-fluoro
  misc_feature (14)..(14): 2'-deoxy-2'-fluoro
  misc_feature (16)..(16): 2'-deoxy-2'-fluoro
  misc_feature (19)..(19): 2'-deoxy-2'-fluoro
  misc_feature (20)..(20): n is thymidine
  misc_feature (21)..(21): 3'-3 attached terminal deoxyabasic moiety
caacucaugcuaacgcagcnn

SEQ ID NO: 1991 - RNA, 21 nt, Artificial Sequence
  Description of Artificial Sequence:  siNA sense region
  misc_feature (1)..(1): 5'-3 attached terminal deoxyabasic moiety
  misc_feature (3)..(5): 2'-deoxy-2'-fluoro
  misc_feature (7)..(7): 2'-deoxy-2'-fluoro
  misc_feature (9)..(10): 2'-deoxy-2'-fluoro
  misc_feature (13)..(13): 2'-deoxy-2'-fluoro
  misc_feature (15)..(15): 2'-deoxy-2'-fluoro
  misc_feature (18)..(18): 2'-deoxy-2'-fluoro
  misc_feature (20)..(20): n is thymidine
  misc_feature (21)..(21): 3'-3 attached terminal deoxyabasic moiety
aacucaugcuaacgcagcann

SEQ ID NO: 1992 - RNA, 21 nt, Artificial Sequence
  Description of Artificial Sequence:  siNA sense region
  misc_feature (1)..(1): 5'-3 attached terminal deoxyabasic moiety
  misc_feature (2)..(4): 2'-deoxy-2'-fluoro
  misc_feature (6)..(6): 2'-deoxy-2'-fluoro
  misc_feature (8)..(9): 2'-deoxy-2'-fluoro
  misc_feature (12)..(12): 2'-deoxy-2'-fluoro
  misc_feature (14)..(14): 2'-deoxy-2'-fluoro
  misc_feature (17)..(17): 2'-deoxy-2'-fluoro
  misc_feature (20)..(20): n is thymidine
  misc_feature (21)..(21): 3'-3 attached terminal deoxyabasic moiety
acucaugcuaacgcagcagnn

SEQ ID NO: 1993 - RNA, 21 nt, Artificial Sequence
  Description of Artificial Sequence:  siNA sense region
  misc_feature (1)..(1): 5'-3 attached terminal deoxyabasic moiety
  misc_feature (1)..(1): 2'-deoxy-2'-fluoro
  misc_feature (3)..(4): 2'-deoxy-2'-fluoro
  misc_feature (7)..(8): 2'-deoxy-2'-fluoro
  misc_feature (14)..(15): 2'-deoxy-2'-fluoro
  misc_feature (17)..(17): 2'-deoxy-2'-fluoro
  misc_feature (19)..(19): 2'-deoxy-2'-fluoro
  misc_feature (20)..(20): n is thymidine
  misc_feature (21)..(21): 3'-3 attached terminal deoxyabasic moiety
cauugaccaagaacugcaunn

SEQ ID NO: 1994 - RNA, 21 nt, Artificial Sequence
  Description of Artificial Sequence:  siNA sense region
  misc_feature (1)..(1): 5'-3 attached terminal deoxyabasic moiety
  misc_feature (2)..(3): 2'-deoxy-2'-fluoro
  misc_feature (6)..(7): 2'-deoxy-2'-fluoro
  misc_feature (13)..(14): 2'-deoxy-2'-fluoro
  misc_feature (16)..(16): 2'-deoxy-2'-fluoro
  misc_feature (18)..(18): 2'-deoxy-2'-fluoro
  misc_feature (20)..(20): n is thymidine
  misc_feature (21)..(21): 3'-3 attached terminal deoxyabasic moiety
auugaccaagaacugcaugnn

SEQ ID NO: 1995 - RNA, 21 nt, Artificial Sequence
  Description of Artificial Sequence:  siNA sense region
  misc_feature (1)..(1): 5'-3 attached terminal deoxyabasic moiety
  misc_feature (1)..(2): 2'-deoxy-2'-fluoro
  misc_feature (5)..(6): 2'-deoxy-2'-fluoro
  misc_feature (12)..(13): 2'-deoxy-2'-fluoro
  misc_feature (15)..(15): 2'-deoxy-2'-fluoro
  misc_feature (17)..(17): 2'-deoxy-2'-fluoro
  misc_feature (20)..(20): n is thymidine
  misc_feature (21)..(21): 3'-3 attached terminal deoxyabasic moiety
uugaccaagaacugcauggnn

SEQ ID NO: 1996 - RNA, 21 nt, Artificial Sequence
  Description of Artificial Sequence:  siNA sense region
  misc_feature (1)..(1): 5'-3 attached terminal deoxyabasic moiety
  misc_feature (1)..(1): 2'-deoxy-2'-fluoro
  misc_feature (4)..(5): 2'-deoxy-2'-fluoro
  misc_feature (11)..(12): 2'-deoxy-2'-fluoro
  misc_feature (14)..(14): 2'-deoxy-2'-fluoro
  misc_feature (16)..(16): 2'-deoxy-2'-fluoro
  misc_feature (20)..(20): n is thymidine
  misc_feature (21)..(21): 3'-3 attached terminal deoxyabasic moiety
ugaccaagaacugcauggann

SEQ ID NO: 1997 - RNA, 21 nt, Artificial Sequence
  Description of Artificial Sequence:  siNA sense region
  misc_feature (1)..(1): 5'-3 attached terminal deoxyabasic moiety
  misc_feature (2)..(3): 2'-deoxy-2'-fluoro
  misc_feature (9)..(10): 2'-deoxy-2'-fluoro
  misc_feature (12)..(12): 2'-deoxy-2'-fluoro
  misc_feature (14)..(14): 2'-deoxy-2'-fluoro
  misc_feature (18)..(19): 2'-deoxy-2'-fluoro
  misc_feature (20)..(20): n is thymidine
  misc_feature (21)..(21): 3'-3 attached terminal deoxyabasic moiety
accaagaacugcauggaccnn

SEQ ID NO: 1998 - RNA, 21 nt, Artificial Sequence
  Description of Artificial Sequence:  siNA sense region
  misc_feature (1)..(1): 5'-3 attached terminal deoxyabasic moiety
  misc_feature (1)..(1): 2'-deoxy-2'-fluoro
  misc_feature (7)..(8): 2'-deoxy-2'-fluoro
  misc_feature (10)..(10): 2'-deoxy-2'-fluoro
  misc_feature (12)..(12): 2'-deoxy-2'-fluoro
  misc_feature (16)..(18): 2'-deoxy-2'-fluoro
  misc_feature (20)..(20): n is thymidine
  misc_feature (21)..(21): 3'-3 attached terminal deoxyabasic moiety
caagaacugcauggaccuann

SEQ ID NO: 1999 - RNA, 21 nt, Artificial Sequence
  Description of Artificial Sequence:  siNA sense region
  misc_feature (1)..(1): 5'-3 attached terminal deoxyabasic moiety
  misc_feature (5)..(6): 2'-deoxy-2'-fluoro
  misc_feature (8)..(8): 2'-deoxy-2'-fluoro
  misc_feature (10)..(10): 2'-deoxy-2'-fluoro
  misc_feature (14)..(16): 2'-deoxy-2'-fluoro
  misc_feature (19)..(19): 2'-deoxy-2'-fluoro
  misc_feature (20)..(20): n is thymidine
  misc_feature (21)..(21): 3'-3 attached terminal deoxyabasic moiety
agaacugcauggaccuaacnn

SEQ ID NO: 2000 - RNA, 21 nt, Artificial Sequence
  Description of Artificial Sequence:  siNA sense region
  misc_feature (1)..(1): 5'-3 attached terminal deoxyabasic moiety
  misc_feature (3)..(4): 2'-deoxy-2'-fluoro
  misc_feature (6)..(6): 2'-deoxy-2'-fluoro
  misc_feature (8)..(8): 2'-deoxy-2'-fluoro
  misc_feature (12)..(14): 2'-deoxy-2'-fluoro
  misc_feature (17)..(17): 2'-deoxy-2'-fluoro
  misc_feature (19)..(19): 2'-deoxy-2'-fluoro
  misc_feature (20)..(20): n is thymidine
  misc_feature (21)..(21): 3'-3 attached terminal deoxyabasic moiety
aacugcauggaccuaacaunn

SEQ ID NO: 2001 - RNA, 21 nt, Artificial Sequence
  Description of Artificial Sequence:  siNA sense region
  misc_feature (1)..(1): 5'-3 attached terminal deoxyabasic moiety
  misc_feature (2)..(3): 2'-deoxy-2'-fluoro
  misc_feature (5)..(5): 2'-deoxy-2'-fluoro
  misc_feature (7)..(7): 2'-deoxy-2'-fluoro
  misc_feature (11)..(13): 2'-deoxy-2'-fluoro
  misc_feature (16)..(16): 2'-deoxy-2'-fluoro
  misc_feature (18)..(19): 2'-deoxy-2'-fluoro
  misc_feature (20)..(20): n is thymidine
  misc_feature (21)..(21): 3'-3 attached terminal deoxyabasic moiety
acugcauggaccuaacauunn

SEQ ID NO: 2002 - RNA, 21 nt, Artificial Sequence
  Description of Artificial Sequence:  siNA sense region
  misc_feature (1)..(1): 5'-3 attached terminal deoxyabasic moiety
  misc_feature (1)..(2): 2'-deoxy-2'-fluoro
  misc_feature (4)..(4): 2'-deoxy-2'-fluoro
  misc_feature (6)..(6): 2'-deoxy-2'-fluoro
  misc_feature (10)..(12): 2'-deoxy-2'-fluoro
  misc_feature (15)..(15): 2'-deoxy-2'-fluoro
  misc_feature (17)..(19): 2'-deoxy-2'-fluoro
  misc_feature (20)..(20): n is thymidine
  misc_feature (21)..(21): 3'-3 attached terminal deoxyabasic moiety
cugcauggaccuaacauucnn

SEQ ID NO: 2003 - RNA, 21 nt, Artificial Sequence
  Description of Artificial Sequence:  siNA sense region
  misc_feature (1)..(1): 5'-3 attached terminal deoxyabasic moiety
  misc_feature (2)..(2): 2'-deoxy-2'-fluoro
  misc_feature (4)..(4): 2'-deoxy-2'-fluoro
  misc_feature (8)..(10): 2'-deoxy-2'-fluoro
  misc_feature (13)..(13): 2'-deoxy-2'-fluoro
  misc_feature (15)..(17): 2'-deoxy-2'-fluoro
  misc_feature (20)..(20): n is thymidine
  misc_feature (21)..(21): 3'-3 attached terminal deoxyabasic moiety
gcauggaccuaacauucgann

SEQ ID NO: 2004 - RNA, 21 nt, Artificial Sequence
  Description of Artificial Sequence:  siNA sense region
  misc_feature (1)..(1): 5'-3 attached terminal deoxyabasic moiety
  misc_feature (2)..(2): 2'-deoxy-2'-fluoro
  misc_feature (6)..(8): 2'-deoxy-2'-fluoro
  misc_feature (11)..(11): 2'-deoxy-2'-fluoro
  misc_feature (13)..(15): 2'-deoxy-2'-fluoro
  misc_feature (18)..(19): 2'-deoxy-2'-fluoro
  misc_feature (20)..(20): n is thymidine
  misc_feature (21)..(21): 3'-3 attached terminal deoxyabasic moiety
auggaccuaacauucgaucnn

SEQ ID NO: 2005 - RNA, 21 nt, Artificial Sequence
  Description of Artificial Sequence:  siNA sense region
  misc_feature (1)..(4): 2'-deoxy-2'-fluoro
  misc_feature (11)..(12): 2'-deoxy-2'-fluoro
  misc_feature (14)..(14): 2'-deoxy-2'-fluoro
  misc_feature (17)..(18): 2'-deoxy-2'-fluoro
  misc_feature (20)..(21): internucleotide phosphorothioate linkage
cuuugaaaagucgcggucann

SEQ ID NO: 2006 - RNA, 21 nt, Artificial Sequence
  Description of Artificial Sequence:  siNA sense region
  misc_feature (3)..(4): 2'-deoxy-2'-fluoro
  misc_feature (9)..(10): 2'-deoxy-2'-fluoro
  misc_feature (12)..(13): 2'-deoxy-2'-fluoro
  misc_feature (18)..(19): 2'-deoxy-2'-fluoro
  misc_feature (20)..(21): internucleotide phosphorothioate linkage
gguugaaguugcugagguunn

SEQ ID NO: 2007 - RNA, 21 nt, Artificial Sequence
  Description of Artificial Sequence:  siNA sense region
  misc_feature (4)..(5): 2'-deoxy-2'-fluoro
  misc_feature (10)..(11): 2'-deoxy-2'-fluoro
  misc_feature (13)..(14): 2'-deoxy-2'-fluoro
  misc_feature (19)..(19): 2'-deoxy-2'-fluoro
  misc_feature (20)..(21): internucleotide phosphorothioate linkage
ggguugaaguugcugaggunn

SEQ ID NO: 2008 - RNA, 21 nt, Artificial Sequence
  Description of Artificial Sequence:  siNA sense region
  misc_feature (1)..(2): 2'-deoxy-2'-fluoro
  misc_feature (7)..(11): 2'-deoxy-2'-fluoro
  misc_feature (13)..(19): 2'-deoxy-2'-fluoro
  misc_feature (20)..(21): internucleotide phosphorothioate linkage
ucaagguuuucacuuuuucnn

SEQ ID NO: 2009 - RNA, 21 nt, Artificial Sequence
  Description of Artificial Sequence:  siNA sense region
  misc_feature (1)..(3): 2'-deoxy-2'-fluoro
  misc_feature (8)..(12): 2'-deoxy-2'-fluoro
  misc_feature (14)..(19): 2'-deoxy-2'-fluoro
  misc_feature (20)..(21): internucleotide phosphorothioate linkage
uucaagguuuucacuuuuunn

SEQ ID NO: 2010 - RNA, 21 nt, Artificial Sequence
  Description of Artificial Sequence:  siNA sense region
  misc_feature (1)..(2): 2'-deoxy-2'-fluoro
  misc_feature (4)..(4): 2'-deoxy-2'-fluoro
  misc_feature (6)..(7): 2'-deoxy-2'-fluoro
  misc_feature (9)..(11): 2'-deoxy-2'-fluoro
  misc_feature (13)..(18): 2'-deoxy-2'-fluoro
  misc_feature (20)..(21): internucleotide phosphorothioate linkage
cugugccaccuguucccugnn

SEQ ID NO: 2011 - RNA, 21 nt, Artificial Sequence
  Description of Artificial Sequence:  siNA sense region
  misc_feature (2)..(2): 2'-deoxy-2'-fluoro
  misc_feature (4)..(4): 2'-deoxy-2'-fluoro
  misc_feature (7)..(9): 2'-deoxy-2'-fluoro
  misc_feature (11)..(11): 2'-deoxy-2'-fluoro
  misc_feature (14)..(19): 2'-deoxy-2'-fluoro
  misc_feature (20)..(21): internucleotide phosphorothioate linkage
acgugguucaugacuuucunn

SEQ ID NO: 2012 - RNA, 21 nt, Artificial Sequence
  Description of Artificial Sequence:  siNA sense region
  misc_feature (3)..(3): 2'-deoxy-2'-fluoro
  misc_feature (5)..(5): 2'-deoxy-2'-fluoro
  misc_feature (8)..(10): 2'-deoxy-2'-fluoro
  misc_feature (12)..(12): 2'-deoxy-2'-fluoro
  misc_feature (15)..(19): 2'-deoxy-2'-fluoro
  misc_feature (20)..(21): internucleotide phosphorothioate linkage
aacgugguucaugacuuucnn

SEQ ID NO: 2013 - RNA, 21 nt, Artificial Sequence
  Description of Artificial Sequence:  siNA sense region
  misc_feature (1)..(2): 2'-deoxy-2'-fluoro
  misc_feature (5)..(5): 2'-deoxy-2'-fluoro
  misc_feature (7)..(7): 2'-deoxy-2'-fluoro
  misc_feature (10)..(12): 2'-deoxy-2'-fluoro
  misc_feature (14)..(14): 2'-deoxy-2'-fluoro
  misc_feature (17)..(19): 2'-deoxy-2'-fluoro
  misc_feature (20)..(21): internucleotide phosphorothioate linkage
uuaacgugguucaugacuunn

SEQ ID NO: 2014 - RNA, 21 nt, Artificial Sequence
  Description of Artificial Sequence:  siNA sense region
  misc_feature (1)..(2): 2'-deoxy-2'-fluoro
  misc_feature (4)..(5): 2'-deoxy-2'-fluoro
  misc_feature (8)..(8): 2'-deoxy-2'-fluoro
  misc_feature (10)..(10): 2'-deoxy-2'-fluoro
  misc_feature (13)..(15): 2'-deoxy-2'-fluoro
  misc_feature (17)..(17): 2'-deoxy-2'-fluoro
  misc_feature (20)..(21): internucleotide phosphorothioate linkage
cuguuaacgugguucaugann

SEQ ID NO: 2015 - RNA, 21 nt, Artificial Sequence
  Description of Artificial Sequence:  siNA sense region
  misc_feature (2)..(2): 2'-deoxy-2'-fluoro
  misc_feature (4)..(4): 2'-deoxy-2'-fluoro
  misc_feature (8)..(9): 2'-deoxy-2'-fluoro
  misc_feature (12)..(12): 2'-deoxy-2'-fluoro
  misc_feature (14)..(16): 2'-deoxy-2'-fluoro
  misc_feature (18)..(19): 2'-deoxy-2'-fluoro
  misc_feature (20)..(21): internucleotide phosphorothioate linkage
gcaugaguuggcacccacunn

SEQ ID NO: 2016 - RNA, 21 nt, Artificial Sequence
  Description of Artificial Sequence:  siNA sense region
  misc_feature (2)..(2): 2'-deoxy-2'-fluoro
  misc_feature (4)..(5): 2'-deoxy-2'-fluoro
  misc_feature (8)..(8): 2'-deoxy-2'-fluoro
  misc_feature (10)..(10): 2'-deoxy-2'-fluoro
  misc_feature (14)..(15): 2'-deoxy-2'-fluoro
  misc_feature (18)..(18): 2'-deoxy-2'-fluoro
  misc_feature (20)..(21): internucleotide phosphorothioate linkage
gcguuagcaugaguuggcann

SEQ ID NO: 2017 - RNA, 21 nt, Artificial Sequence
  Description of Artificial Sequence:  siNA sense region
  misc_feature (1)..(1): 2'-deoxy-2'-fluoro
  misc_feature (3)..(3): 2'-deoxy-2'-fluoro
  misc_feature (5)..(6): 2'-deoxy-2'-fluoro
  misc_feature (9)..(9): 2'-deoxy-2'-fluoro
  misc_feature (11)..(11): 2'-deoxy-2'-fluoro
  misc_feature (15)..(16): 2'-deoxy-2'-fluoro
  misc_feature (19)..(19): 2'-deoxy-2'-fluoro
  misc_feature (20)..(21): internucleotide phosphorothioate linkage
ugcguuagcaugaguuggcnn

SEQ ID NO: 2018 - RNA, 21 nt, Artificial Sequence
  Description of Artificial Sequence:  siNA sense region
  misc_feature (2)..(3): 2'-deoxy-2'-fluoro
  misc_feature (5)..(5): 2'-deoxy-2'-fluoro
  misc_feature (7)..(8): 2'-deoxy-2'-fluoro
  misc_feature (11)..(11): 2'-deoxy-2'-fluoro
  misc_feature (13)..(13): 2'-deoxy-2'-fluoro
  misc_feature (17)..(18): 2'-deoxy-2'-fluoro
  misc_feature (20)..(21): internucleotide phosphorothioate linkage
gcugcguuagcaugaguugnn

SEQ ID NO: 2019 - RNA, 21 nt, Artificial Sequence
  Description of Artificial Sequence:  siNA sense region
  misc_feature (1)..(1): 2'-deoxy-2'-fluoro
  misc_feature (3)..(4): 2'-deoxy-2'-fluoro
  misc_feature (6)..(6): 2'-deoxy-2'-fluoro
  misc_feature (8)..(9): 2'-deoxy-2'-fluoro
  misc_feature (12)..(12): 2'-deoxy-2'-fluoro
  misc_feature (14)..(14): 2'-deoxy-2'-fluoro
  misc_feature (18)..(19): 2'-deoxy-2'-fluoro
  misc_feature (20)..(21): internucleotide phosphorothioate linkage
ugcugcguuagcaugaguunn

SEQ ID NO: 2020 - RNA, 21 nt, Artificial Sequence
  Description of Artificial Sequence:  siNA sense region
  misc_feature (1)..(2): 2'-deoxy-2'-fluoro
  misc_feature (4)..(5): 2'-deoxy-2'-fluoro
  misc_feature (7)..(7): 2'-deoxy-2'-fluoro
  misc_feature (9)..(10): 2'-deoxy-2'-fluoro
  misc_feature (13)..(13): 2'-deoxy-2'-fluoro
  misc_feature (15)..(15): 2'-deoxy-2'-fluoro
  misc_feature (19)..(19): 2'-deoxy-2'-fluoro
  misc_feature (20)..(21): internucleotide phosphorothioate linkage
cugcugcguuagcaugagunn

SEQ ID NO: 2021 - RNA, 21 nt, Artificial Sequence
  Description of Artificial Sequence:  siNA sense region
  misc_feature (2)..(2): 2'-deoxy-2'-fluoro
  misc_feature (4)..(4): 2'-deoxy-2'-fluoro
  misc_feature (7)..(11): 2'-deoxy-2'-fluoro
  misc_feature (14)..(15): 2'-deoxy-2'-fluoro
  misc_feature (18)..(18): 2'-deoxy-2'-fluoro
  misc_feature (20)..(21): internucleotide phosphorothioate linkage
augcaguucuuggucaaugnn

SEQ ID NO: 2022 - RNA, 21 nt, Artificial Sequence
  Description of Artificial Sequence:  siNA sense region
  misc_feature (1)..(1): 2'-deoxy-2'-fluoro
  misc_feature (3)..(3): 2'-deoxy-2'-fluoro
  misc_feature (5)..(5): 2'-deoxy-2'-fluoro
  misc_feature (8)..(12): 2'-deoxy-2'-fluoro
  misc_feature (15)..(16): 2'-deoxy-2'-fluoro
  misc_feature (19)..(19): 2'-deoxy-2'-fluoro
  misc_feature (20)..(21): internucleotide phosphorothioate linkage
caugcaguucuuggucaaunn

SEQ ID NO: 2023 - RNA, 21 nt, Artificial Sequence
  Description of Artificial Sequence:  siNA sense region
  misc_feature (1)..(2): 2'-deoxy-2'-fluoro
  misc_feature (4)..(4): 2'-deoxy-2'-fluoro
  misc_feature (6)..(6): 2'-deoxy-2'-fluoro
  misc_feature (9)..(13): 2'-deoxy-2'-fluoro
  misc_feature (16)..(17): 2'-deoxy-2'-fluoro
  misc_feature (20)..(21): internucleotide phosphorothioate linkage
ccaugcaguucuuggucaann

SEQ ID NO: 2024 - RNA, 21 nt, Artificial Sequence
  Description of Artificial Sequence:  siNA sense region
  misc_feature (1)..(3): 2'-deoxy-2'-fluoro
  misc_feature (5)..(5): 2'-deoxy-2'-fluoro
  misc_feature (7)..(7): 2'-deoxy-2'-fluoro
  misc_feature (10)..(14): 2'-deoxy-2'-fluoro
  misc_feature (17)..(18): 2'-deoxy-2'-fluoro
  misc_feature (20)..(21): internucleotide phosphorothioate linkage
uccaugcaguucuuggucann

SEQ ID NO: 2025 - RNA, 21 nt, Artificial Sequence
  Description of Artificial Sequence:  siNA sense region
  misc_feature (3)..(5): 2'-deoxy-2'-fluoro
  misc_feature (7)..(7): 2'-deoxy-2'-fluoro
  misc_feature (9)..(9): 2'-deoxy-2'-fluoro
  misc_feature (12)..(16): 2'-deoxy-2'-fluoro
  misc_feature (19)..(19): 2'-deoxy-2'-fluoro
  misc_feature (20)..(21): internucleotide phosphorothioate linkage
gguccaugcaguucuuggunn

SEQ ID NO: 2026 - RNA, 21 nt, Artificial Sequence
  Description of Artificial Sequence:  siNA sense region
  misc_feature (1)..(1): 2'-deoxy-2'-fluoro
  misc_feature (5)..(7): 2'-deoxy-2'-fluoro
  misc_feature (9)..(9): 2'-deoxy-2'-fluoro
  misc_feature (11)..(11): 2'-deoxy-2'-fluoro
  misc_feature (14)..(18): 2'-deoxy-2'-fluoro
  misc_feature (20)..(21): internucleotide phosphorothioate linkage
uagguccaugcaguucuugnn

SEQ ID NO: 2027 - RNA, 21 nt, Artificial Sequence
  Description of Artificial Sequence:  siNA sense region
  misc_feature (2)..(3): 2'-deoxy-2'-fluoro
  misc_feature (7)..(9): 2'-deoxy-2'-fluoro
  misc_feature (11)..(11): 2'-deoxy-2'-fluoro
  misc_feature (13)..(13): 2'-deoxy-2'-fluoro
  misc_feature (16)..(19): 2'-deoxy-2'-fluoro
  misc_feature (20)..(21): internucleotide phosphorothioate linkage
guuagguccaugcaguucunn

SEQ ID NO: 2028 - RNA, 21 nt, Artificial Sequence
  Description of Artificial Sequence:  siNA sense region
  misc_feature (2)..(2): 2'-deoxy-2'-fluoro
  misc_feature (4)..(5): 2'-deoxy-2'-fluoro
  misc_feature (9)..(11): 2'-deoxy-2'-fluoro
  misc_feature (13)..(13): 2'-deoxy-2'-fluoro
  misc_feature (15)..(15): 2'-deoxy-2'-fluoro
  misc_feature (18)..(19): 2'-deoxy-2'-fluoro
  misc_feature (20)..(21): internucleotide phosphorothioate linkage
auguuagguccaugcaguunn

SEQ ID NO: 2029 - RNA, 21 nt, Artificial Sequence
  Description of Artificial Sequence:  siNA sense region
  misc_feature (3)..(3): 2'-deoxy-2'-fluoro
  misc_feature (5)..(6): 2'-deoxy-2'-fluoro
  misc_feature (10)..(12): 2'-deoxy-2'-fluoro
  misc_feature (14)..(14): 2'-deoxy-2'-fluoro
  misc_feature (16)..(16): 2'-deoxy-2'-fluoro
  misc_feature (19)..(19): 2'-deoxy-2'-fluoro
  misc_feature (20)..(21): internucleotide phosphorothioate linkage
aauguuagguccaugcagunn

SEQ ID NO: 2030 - RNA, 21 nt, Artificial Sequence
  Description of Artificial Sequence:  siNA sense region
  misc_feature (4)..(4): 2'-deoxy-2'-fluoro
  misc_feature (6)..(7): 2'-deoxy-2'-fluoro
  misc_feature (11)..(13): 2'-deoxy-2'-fluoro
  misc_feature (15)..(15): 2'-deoxy-2'-fluoro
  misc_feature (17)..(17): 2'-deoxy-2'-fluoro
  misc_feature (20)..(21): internucleotide phosphorothioate linkage
gaauguuagguccaugcagnn

SEQ ID NO: 2031 - RNA, 21 nt, Artificial Sequence
  Description of Artificial Sequence:  siNA sense region
  misc_feature (1)..(2): 2'-deoxy-2'-fluoro
  misc_feature (6)..(6): 2'-deoxy-2'-fluoro
  misc_feature (8)..(9): 2'-deoxy-2'-fluoro
  misc_feature (13)..(15): 2'-deoxy-2'-fluoro
  misc_feature (17)..(17): 2'-deoxy-2'-fluoro
  misc_feature (19)..(19): 2'-deoxy-2'-fluoro
  misc_feature (20)..(21): internucleotide phosphorothioate linkage
ucgaauguuagguccaugcnn

SEQ ID NO: 2032 - RNA, 21 nt, Artificial Sequence
  Description of Artificial Sequence:  siNA sense region
  misc_feature (3)..(4): 2'-deoxy-2'-fluoro
  misc_feature (8)..(8): 2'-deoxy-2'-fluoro
  misc_feature (10)..(11): 2'-deoxy-2'-fluoro
  misc_feature (15)..(17): 2'-deoxy-2'-fluoro
  misc_feature (19)..(19): 2'-deoxy-2'-fluoro
  misc_feature (20)..(21): internucleotide phosphorothioate linkage
gaucgaauguuagguccaunn

SEQ ID NO: 2033 - RNA, 21 nt, Artificial Sequence
  Description of Artificial Sequence:  siNA sense region
  misc_feature (1)..(1): 5'-3 attached terminal deoxyabasic moiety
  misc_feature (1)..(1): 2'-deoxy-2'-fluoro
  misc_feature (2)..(3): deoxy
  misc_feature (4)..(5): 2'-deoxy-2'-fluoro
  misc_feature (6)..(6): deoxy
  misc_feature (7)..(7): 2'-deoxy-2'-fluoro
  misc_feature (8)..(9): deoxy
  misc_feature (10)..(15): 2'-deoxy-2'-fluoro
  misc_feature (16)..(19): deoxy
  misc_feature (20)..(20): n is thymidine
  misc_feature (21)..(21): 3'-3 attached terminal deoxyabasic moiety
ugaccgcgacuuuucaaagnn

SEQ ID NO: 2034 - RNA, 21 nt, Artificial Sequence
  Description of Artificial Sequence:  siNA sense region
  misc_feature (1)..(1): 5'-3 attached terminal deoxyabasic moiety
  misc_feature (1)..(2): deoxy
  misc_feature (3)..(6): 2'-deoxy-2'-fluoro
  misc_feature (7)..(8): deoxy
  misc_feature (9)..(9): 2'-deoxy-2'-fluoro
  misc_feature (10)..(11): deoxy
  misc_feature (12)..(15): 2'-deoxy-2'-fluoro
  misc_feature (16)..(17): deoxy
  misc_feature (18)..(19): 2'-deoxy-2'-fluoro
  misc_feature (20)..(20): n is thymidine
  misc_feature (21)..(21): 3'-3 attached terminal deoxyabasic moiety
aaccucagcaacuucaaccnn

SEQ ID NO: 2035 - RNA, 21 nt, Artificial Sequence
  Description of Artificial Sequence:  siNA sense region
  misc_feature (1)..(1): 5'-3 attached terminal deoxyabasic moiety
  misc_feature (1)..(1): deoxy
  misc_feature (2)..(5): 2'-deoxy-2'-fluoro
  misc_feature (6)..(7): deoxy
  misc_feature (8)..(8): 2'-deoxy-2'-fluoro
  misc_feature (9)..(10): deoxy
  misc_feature (11)..(14): 2'-deoxy-2'-fluoro
  misc_feature (15)..(16): deoxy
  misc_feature (17)..(19): 2'-deoxy-2'-fluoro
  misc_feature (20)..(20): n is thymidine
  misc_feature (21)..(21): 3'-3 attached terminal deoxyabasic moiety
accucagcaacuucaacccnn

SEQ ID NO: 2036 - RNA, 21 nt, Artificial Sequence
  Description of Artificial Sequence:  siNA sense region
  misc_feature (1)..(1): 5'-3 attached terminal deoxyabasic moiety
  misc_feature (1)..(7): deoxy
  misc_feature (8)..(8): 2'-deoxy-2'-fluoro
  misc_feature (9)..(13): deoxy
  misc_feature (14)..(17): 2'-deoxy-2'-fluoro
  misc_feature (18)..(19): deoxy
  misc_feature (20)..(20): n is thymidine
  misc_feature (21)..(21): 3'-3 attached terminal deoxyabasic moiety
gaaaaagugaaaaccuugann

SEQ ID NO: 2037 - RNA, 21 nt, Artificial Sequence
  Description of Artificial Sequence:  siNA sense region
  misc_feature (1)..(1): 5'-3 attached terminal deoxyabasic moiety
  misc_feature (1)..(6): deoxy
  misc_feature (7)..(7): 2'-deoxy-2'-fluoro
  misc_feature (8)..(12): deoxy
  misc_feature (13)..(16): 2'-deoxy-2'-fluoro
  misc_feature (17)..(19): deoxy
  misc_feature (20)..(20): n is thymidine
  misc_feature (21)..(21): 3'-3 attached terminal deoxyabasic moiety
aaaaagugaaaaccuugaann

SEQ ID NO: 2038 - RNA, 21 nt, Artificial Sequence
  Description of Artificial Sequence:  siNA sense region
  misc_feature (1)..(1): 5'-3 attached terminal deoxyabasic moiety
  misc_feature (1)..(1): 2'-deoxy-2'-fluoro
  misc_feature (2)..(7): deoxy
  misc_feature (8)..(8): 2'-deoxy-2'-fluoro
  misc_feature (9)..(11): deoxy
  misc_feature (12)..(12): 2'-deoxy-2'-fluoro
  misc_feature (13)..(14): deoxy
  misc_feature (15)..(15): 2'-deoxy-2'-fluoro
  misc_feature (16)..(16): deoxy
  misc_feature (17)..(17): 2'-deoxy-2'-fluoro
  misc_feature (18)..(19): deoxy
  misc_feature (20)..(20): n is thymidine
  misc_feature (21)..(21): 3'-3 attached terminal deoxyabasic moiety
cagggaacagguggcacagnn

SEQ ID NO: 2039 - RNA, 21 nt, Artificial Sequence
  Description of Artificial Sequence:  siNA sense region
  misc_feature (1)..(1): 5'-3 attached terminal deoxyabasic moiety
  misc_feature (1)..(6): deoxy
  misc_feature (7)..(8): 2'-deoxy-2'-fluoro
  misc_feature (9)..(9): deoxy
  misc_feature (10)..(10): 2'-deoxy-2'-fluoro
  misc_feature (11)..(13): deoxy
  misc_feature (14)..(15): 2'-deoxy-2'-fluoro
  misc_feature (16)..(16): deoxy
  misc_feature (17)..(17): 2'-deoxy-2'-fluoro
  misc_feature (18)..(18): deoxy
  misc_feature (19)..(19): 2'-deoxy-2'-fluoro
  misc_feature (20)..(20): n is thymidine
  misc_feature (21)..(21): 3'-3 attached terminal deoxyabasic moiety
agaaagucaugaaccacgunn

SEQ ID NO: 2040 - RNA, 21 nt, Artificial Sequence
  Description of Artificial Sequence:  siNA sense region
  misc_feature (1)..(1): 5'-3 attached terminal deoxyabasic moiety
  misc_feature (1)..(5): deoxy
  misc_feature (6)..(7): 2'-deoxy-2'-fluoro
  misc_feature (8)..(8): deoxy
  misc_feature (9)..(9): 2'-deoxy-2'-fluoro
  misc_feature (10)..(12): deoxy
  misc_feature (13)..(14): 2'-deoxy-2'-fluoro
  misc_feature (15)..(15): deoxy
  misc_feature (16)..(16): 2'-deoxy-2'-fluoro
  misc_feature (17)..(17): deoxy
  misc_feature (18)..(19): 2'-deoxy-2'-fluoro
  misc_feature (20)..(20): n is thymidine
  misc_feature (21)..(21): 3'-3 attached terminal deoxyabasic moiety
gaaagucaugaaccacguunn

SEQ ID NO: 2041 - RNA, 21 nt, Artificial Sequence
  Description of Artificial Sequence:  siNA sense region
  misc_feature (1)..(1): 5'-3 attached terminal deoxyabasic moiety
  misc_feature (1)..(3): deoxy
  misc_feature (4)..(5): 2'-deoxy-2'-fluoro
  misc_feature (6)..(6): deoxy
  misc_feature (7)..(7): 2'-deoxy-2'-fluoro
  misc_feature (8)..(10): deoxy
  misc_feature (11)..(12): 2'-deoxy-2'-fluoro
  misc_feature (13)..(13): deoxy
  misc_feature (14)..(14): 2'-deoxy-2'-fluoro
  misc_feature (15)..(15): deoxy
  misc_feature (16)..(17): 2'-deoxy-2'-fluoro
  misc_feature (18)..(19): deoxy
  misc_feature (20)..(20): n is thymidine
  misc_feature (21)..(21): 3'-3 attached terminal deoxyabasic moiety
aagucaugaaccacguuaann

SEQ ID NO: 2042 - RNA, 21 nt, Artificial Sequence
  Description of Artificial Sequence:  siNA sense region
  misc_feature (1)..(1): 5'-3 attached terminal deoxyabasic moiety
  misc_feature (1)..(2): 2'-deoxy-2'-fluoro
  misc_feature (3)..(3): deoxy
  misc_feature (4)..(4): 2'-deoxy-2'-fluoro
  misc_feature (5)..(7): deoxy
  misc_feature (8)..(9): 2'-deoxy-2'-fluoro
  misc_feature (10)..(10): deoxy
  misc_feature (11)..(11): 2'-deoxy-2'-fluoro
  misc_feature (12)..(12): deoxy
  misc_feature (13)..(14): 2'-deoxy-2'-fluoro
  misc_feature (15)..(16): deoxy
  misc_feature (17)..(17): 2'-deoxy-2'-fluoro
  misc_feature (18)..(19): deoxy
  misc_feature (20)..(20): n is thymidine
  misc_feature (21)..(21): 3'-3 attached terminal deoxyabasic moiety
ucaugaaccacguuaacagnn

SEQ ID NO: 2043 - RNA, 21 nt, Artificial Sequence
  Description of Artificial Sequence:  siNA sense region
  misc_feature (1)..(1): 5'-3 attached terminal deoxyabasic moiety
  misc_feature (1)..(2): deoxy
  misc_feature (3)..(3): 2'-deoxy-2'-fluoro
  misc_feature (4)..(6): deoxy
  misc_feature (7)..(7): 2'-deoxy-2'-fluoro
  misc_feature (8)..(8): deoxy
  misc_feature (9)..(10): 2'-deoxy-2'-fluoro
  misc_feature (11)..(12): deoxy
  misc_feature (13)..(15): 2'-deoxy-2'-fluoro
  misc_feature (16)..(16): deoxy
  misc_feature (17)..(17): 2'-deoxy-2'-fluoro
  misc_feature (18)..(18): deoxy
  misc_feature (19)..(19): 2'-deoxy-2'-fluoro
  misc_feature (20)..(20): n is thymidine
  misc_feature (21)..(21): 3'-3 attached terminal deoxyabasic moiety
agugggugccaacucaugcnn

SEQ ID NO: 2044 - RNA, 21 nt, Artificial Sequence
  Description of Artificial Sequence:  siNA sense region
  misc_feature (1)..(1): 5'-3 attached terminal deoxyabasic moiety
  misc_feature (1)..(1): 2'-deoxy-2'-fluoro
  misc_feature (2)..(2): deoxy
  misc_feature (3)..(4): 2'-deoxy-2'-fluoro
  misc_feature (5)..(6): deoxy
  misc_feature (7)..(9): 2'-deoxy-2'-fluoro
  misc_feature (10)..(10): deoxy
  misc_feature (11)..(11): 2'-deoxy-2'-fluoro
  misc_feature (12)..(12): deoxy
  misc_feature (13)..(14): 2'-deoxy-2'-fluoro
  misc_feature (15)..(16): deoxy
  misc_feature (17)..(17): 2'-deoxy-2'-fluoro
  misc_feature (18)..(18): deoxy
  misc_feature (19)..(19): 2'-deoxy-2'-fluoro
  misc_feature (20)..(20): n is thymidine
  misc_feature (21)..(21): 3'-3 attached terminal deoxyabasic moiety
ugccaacucaugcuaacgcnn

SEQ ID NO: 2045 - RNA, 21 nt, Artificial Sequence
  Description of Artificial Sequence:  siNA sense region
  misc_feature (1)..(1): 5'-3 attached terminal deoxyabasic moiety
  misc_feature (1)..(1): deoxy
  misc_feature (2)..(3): 2'-deoxy-2'-fluoro
  misc_feature (4)..(5): deoxy
  misc_feature (6)..(8): 2'-deoxy-2'-fluoro
  misc_feature (9)..(9): deoxy
  misc_feature (10)..(10): 2'-deoxy-2'-fluoro
  misc_feature (11)..(11): deoxy
  misc_feature (12)..(13): 2'-deoxy-2'-fluoro
  misc_feature (14)..(15): deoxy
  misc_feature (16)..(16): 2'-deoxy-2'-fluoro
  misc_feature (17)..(17): deoxy
  misc_feature (18)..(18): 2'-deoxy-2'-fluoro
  misc_feature (19)..(19): deoxy
  misc_feature (20)..(20): n is thymidine
  misc_feature (21)..(21): 3'-3 attached terminal deoxyabasic moiety
gccaacucaugcuaacgcann

SEQ ID NO: 2046 - RNA, 21 nt, Artificial Sequence
  Description of Artificial Sequence:  siNA sense region
  misc_feature (1)..(1): 5'-3 attached terminal deoxyabasic moiety
  misc_feature (1)..(1): 2'-deoxy-2'-fluoro
  misc_feature (2)..(3): deoxy
  misc_feature (4)..(6): 2'-deoxy-2'-fluoro
  misc_feature (7)..(7): deoxy
  misc_feature (8)..(8): 2'-deoxy-2'-fluoro
  misc_feature (9)..(9): deoxy
  misc_feature (10)..(11): 2'-deoxy-2'-fluoro
  misc_feature (12)..(13): deoxy
  misc_feature (14)..(14): 2'-deoxy-2'-fluoro
  misc_feature (15)..(15): deoxy
  misc_feature (16)..(16): 2'-deoxy-2'-fluoro
  misc_feature (17)..(18): deoxy
  misc_feature (19)..(19): 2'-deoxy-2'-fluoro
  misc_feature (20)..(20): n is thymidine
  misc_feature (21)..(21): 3'-3 attached terminal deoxyabasic moiety
caacucaugcuaacgcagcnn

SEQ ID NO: 2047 - RNA, 21 nt, Artificial Sequence
  Description of Artificial Sequence:  siNA sense region
  misc_feature (1)..(1): 5'-3 attached terminal deoxyabasic moiety
  misc_feature (1)..(2): deoxy
  misc_feature (3)..(5): 2'-deoxy-2'-fluoro
  misc_feature (6)..(6): deoxy
  misc_feature (7)..(7): 2'-deoxy-2'-fluoro
  misc_feature (8)..(8): deoxy
  misc_feature (9)..(10): 2'-deoxy-2'-fluoro
  misc_feature (11)..(12): deoxy
  misc_feature (13)..(13): 2'-deoxy-2'-fluoro
  misc_feature (14)..(14): deoxy
  misc_feature (15)..(15): 2'-deoxy-2'-fluoro
  misc_feature (16)..(17): deoxy
  misc_feature (18)..(18): 2'-deoxy-2'-fluoro
  misc_feature (19)..(19): deoxy
  misc_feature (20)..(20): n is thymidine
  misc_feature (21)..(21): 3'-3 attached terminal deoxyabasic moiety
aacucaugcuaacgcagcann

SEQ ID NO: 2048 - RNA, 21 nt, Artificial Sequence
  Description of Artificial Sequence:  siNA sense region
  misc_feature (1)..(1): 5'-3 attached terminal deoxyabasic moiety
  misc_feature (1)..(1): deoxy
  misc_feature (2)..(4): 2'-deoxy-2'-fluoro
  misc_feature (5)..(5): deoxy
  misc_feature (6)..(6): 2'-deoxy-2'-fluoro
  misc_feature (7)..(7): deoxy
  misc_feature (8)..(9): 2'-deoxy-2'-fluoro
  misc_feature (10)..(11): deoxy
  misc_feature (12)..(12): 2'-deoxy-2'-fluoro
  misc_feature (13)..(13): deoxy
  misc_feature (14)..(14): 2'-deoxy-2'-fluoro
  misc_feature (15)..(16): deoxy
  misc_feature (17)..(17): 2'-deoxy-2'-fluoro
  misc_feature (18)..(19): deoxy
  misc_feature (20)..(20): n is thymidine
  misc_feature (21)..(21): 3'-3 attached terminal deoxyabasic moiety
acucaugcuaacgcagcagnn

SEQ ID NO: 2049 - RNA, 21 nt, Artificial Sequence
  Description of Artificial Sequence:  siNA sense region
  misc_feature (1)..(1): 5'-3 attached terminal deoxyabasic moiety
  misc_feature (1)..(1): 2'-deoxy-2'-fluoro
  misc_feature (2)..(2): deoxy
  misc_feature (3)..(4): 2'-deoxy-2'-fluoro
  misc_feature (5)..(6): deoxy
  misc_feature (7)..(8): 2'-deoxy-2'-fluoro
  misc_feature (9)..(13): deoxy
  misc_feature (14)..(15): 2'-deoxy-2'-fluoro
  misc_feature (16)..(16): deoxy
  misc_feature (17)..(17): 2'-deoxy-2'-fluoro
  misc_feature (18)..(18): deoxy
  misc_feature (19)..(19): 2'-deoxy-2'-fluoro
  misc_feature (20)..(20): n is thymidine
  misc_feature (21)..(21): 3'-3 attached terminal deoxyabasic moiety
cauugaccaagaacugcaunn

SEQ ID NO: 2050 - RNA, 21 nt, Artificial Sequence
  Description of Artificial Sequence:  siNA sense region
  misc_feature (1)..(1): 5'-3 attached terminal deoxyabasic moiety
  misc_feature (1)..(1): deoxy
  misc_feature (2)..(3): 2'-deoxy-2'-fluoro
  misc_feature (4)..(5): deoxy
  misc_feature (6)..(7): 2'-deoxy-2'-fluoro
  misc_feature (8)..(12): deoxy
  misc_feature (13)..(14): 2'-deoxy-2'-fluoro
  misc_feature (15)..(15): deoxy
  misc_feature (16)..(16): 2'-deoxy-2'-fluoro
  misc_feature (17)..(17): deoxy
  misc_feature (18)..(18): 2'-deoxy-2'-fluoro
  misc_feature (19)..(19): deoxy
  misc_feature (20)..(20): n is thymidine
  misc_feature (21)..(21): 3'-3 attached terminal deoxyabasic moiety
auugaccaagaacugcaugnn

SEQ ID NO: 2051 - RNA, 21 nt, Artificial Sequence
  Description of Artificial Sequence:  siNA sense region
  misc_feature (1)..(1): 5'-3 attached terminal deoxyabasic moiety
  misc_feature (1)..(2): 2'-deoxy-2'-fluoro
  misc_feature (3)..(4): deoxy
  misc_feature (5)..(6): 2'-deoxy-2'-fluoro
  misc_feature (7)..(11): deoxy
  misc_feature (12)..(13): 2'-deoxy-2'-fluoro
  misc_feature (14)..(14): deoxy
  misc_feature (15)..(15): 2'-deoxy-2'-fluoro
  misc_feature (16)..(16): deoxy
  misc_feature (17)..(17): 2'-deoxy-2'-fluoro
  misc_feature (18)..(19): deoxy
  misc_feature (20)..(20): n is thymidine
  misc_feature (21)..(21): 3'-3 attached terminal deoxyabasic moiety
uugaccaagaacugcauggnn

SEQ ID NO: 2052 - RNA, 21 nt, Artificial Sequence
  Description of Artificial Sequence:  siNA sense region
  misc_feature (1)..(1): 5'-3 attached terminal deoxyabasic moiety
  misc_feature (1)..(1): 2'-deoxy-2'-fluoro
  misc_feature (2)..(3): deoxy
  misc_feature (4)..(5): 2'-deoxy-2'-fluoro
  misc_feature (6)..(10): deoxy
  misc_feature (11)..(12): 2'-deoxy-2'-fluoro
  misc_feature (13)..(13): deoxy
  misc_feature (14)..(14): 2'-deoxy-2'-fluoro
  misc_feature (15)..(15): deoxy
  misc_feature (16)..(16): 2'-deoxy-2'-fluoro
  misc_feature (17)..(19): deoxy
  misc_feature (20)..(20): n is thymidine
  misc_feature (21)..(21): 3'-3 attached terminal deoxyabasic moiety
ugaccaagaacugcauggann

SEQ ID NO: 2053 - RNA, 21 nt, Artificial Sequence
  Description of Artificial Sequence:  siNA sense region
  misc_feature (1)..(1): 5'-3 attached terminal deoxyabasic moiety
  misc_feature (1)..(1): deoxy
  misc_feature (2)..(3): 2'-deoxy-2'-fluoro
  misc_feature (4)..(8): deoxy
  misc_feature (9)..(10): 2'-deoxy-2'-fluoro
  misc_feature (11)..(11): deoxy
  misc_feature (12)..(12): 2'-deoxy-2'-fluoro
  misc_feature (13)..(13): deoxy
  misc_feature (14)..(14): 2'-deoxy-2'-fluoro
  misc_feature (15)..(17): deoxy
  misc_feature (18)..(19): 2'-deoxy-2'-fluoro
  misc_feature (20)..(20): n is thymidine
  misc_feature (21)..(21): 3'-3 attached terminal deoxyabasic moiety
accaagaacugcauggaccnn

SEQ ID NO: 2054 - RNA, 21 nt, Artificial Sequence
  Description of Artificial Sequence:  siNA sense region
  misc_feature (1)..(1): 5'-3 attached terminal deoxyabasic moiety
  misc_feature (1)..(1): 2'-deoxy-2'-fluoro
  misc_feature (2)..(6): deoxy
  misc_feature (7)..(8): 2'-deoxy-2'-fluoro
  misc_feature (9)..(9): deoxy
  misc_feature (10)..(10): 2'-deoxy-2'-fluoro
  misc_feature (11)..(11): deoxy
  misc_feature (12)..(12): 2'-deoxy-2'-fluoro
  misc_feature (13)..(15): deoxy
  misc_feature (16)..(18): 2'-deoxy-2'-fluoro
  misc_feature (19)..(19): deoxy
  misc_feature (20)..(20): n is thymidine
  misc_feature (21)..(21): 3'-3 attached terminal deoxyabasic moiety
caagaacugcauggaccuann

SEQ ID NO: 2055 - RNA, 21 nt, Artificial Sequence
  Description of Artificial Sequence:  siNA sense region
  misc_feature (1)..(1): 5'-3 attached terminal deoxyabasic moiety
  misc_feature (1)..(4): deoxy
  misc_feature (5)..(6): 2'-deoxy-2'-fluoro
  misc_feature (7)..(7): deoxy
  misc_feature (8)..(8): 2'-deoxy-2'-fluoro
  misc_feature (9)..(9): deoxy
  misc_feature (10)..(10): 2'-deoxy-2'-fluoro
  misc_feature (11)..(13): deoxy
  misc_feature (14)..(16): 2'-deoxy-2'-fluoro
  misc_feature (17)..(18): deoxy
  misc_feature (19)..(19): 2'-deoxy-2'-fluoro
  misc_feature (20)..(20): n is thymidine
  misc_feature (21)..(21): 3'-3 attached terminal deoxyabasic moiety
agaacugcauggaccuaacnn

SEQ ID NO: 2056 - RNA, 21 nt, Artificial Sequence
  Description of Artificial Sequence:  siNA sense region
  misc_feature (1)..(1): 5'-3 attached terminal deoxyabasic moiety
  misc_feature (1)..(2): deoxy
  misc_feature (3)..(4): 2'-deoxy-2'-fluoro
  misc_feature (5)..(5): deoxy
  misc_feature (6)..(6): 2'-deoxy-2'-fluoro
  misc_feature (7)..(7): deoxy
  misc_feature (8)..(8): 2'-deoxy-2'-fluoro
  misc_feature (9)..(11): deoxy
  misc_feature (12)..(14): 2'-deoxy-2'-fluoro
  misc_feature (15)..(16): deoxy
  misc_feature (17)..(17): 2'-deoxy-2'-fluoro
  misc_feature (18)..(18): deoxy
  misc_feature (19)..(19): 2'-deoxy-2'-fluoro
  misc_feature (20)..(20): n is thymidine
  misc_feature (21)..(21): 3'-3 attached terminal deoxyabasic moiety
aacugcauggaccuaacaunn

SEQ ID NO: 2057 - RNA, 21 nt, Artificial Sequence
  Description of Artificial Sequence:  siNA sense region
  misc_feature (1)..(1): 5'-3 attached terminal deoxyabasic moiety
  misc_feature (1)..(1): deoxy
  misc_feature (2)..(3): 2'-deoxy-2'-fluoro
  misc_feature (4)..(4): deoxy
  misc_feature (5)..(5): 2'-deoxy-2'-fluoro
  misc_feature (6)..(6): deoxy
  misc_feature (7)..(7): 2'-deoxy-2'-fluoro
  misc_feature (8)..(10): deoxy
  misc_feature (11)..(13): 2'-deoxy-2'-fluoro
  misc_feature (14)..(15): deoxy
  misc_feature (16)..(16): 2'-deoxy-2'-fluoro
  misc_feature (17)..(17): deoxy
  misc_feature (18)..(19): 2'-deoxy-2'-fluoro
  misc_feature (20)..(20): n is thymidine
  misc_feature (21)..(21): 3'-3 attached terminal deoxyabasic moiety
acugcauggaccuaacauunn

SEQ ID NO: 2058 - RNA, 21 nt, Artificial Sequence
  Description of Artificial Sequence:  siNA sense region
  misc_feature (1)..(1): 5'-3 attached terminal deoxyabasic moiety
  misc_feature (1)..(2): 2'-deoxy-2'-fluoro
  misc_feature (3)..(3): deoxy
  misc_feature (4)..(4): 2'-deoxy-2'-fluoro
  misc_feature (5)..(5): deoxy
  misc_feature (6)..(6): 2'-deoxy-2'-fluoro
  misc_feature (7)..(9): deoxy
  misc_feature (10)..(12): 2'-deoxy-2'-fluoro
  misc_feature (13)..(14): deoxy
  misc_feature (15)..(15): 2'-deoxy-2'-fluoro
  misc_feature (16)..(16): deoxy
  misc_feature (17)..(19): 2'-deoxy-2'-fluoro
  misc_feature (20)..(20): n is thymidine
  misc_feature (21)..(21): 3'-3 attached terminal deoxyabasic moiety
cugcauggaccuaacauucnn

SEQ ID NO: 2059 - RNA, 21 nt, Artificial Sequence
  Description of Artificial Sequence:  siNA sense region
  misc_feature (1)..(1): 5'-3 attached terminal deoxyabasic moiety
  misc_feature (1)..(1): deoxy
  misc_feature (2)..(2): 2'-deoxy-2'-fluoro
  misc_feature (3)..(3): deoxy
  misc_feature (4)..(4): 2'-deoxy-2'-fluoro
  misc_feature (5)..(7): deoxy
  misc_feature (8)..(10): 2'-deoxy-2'-fluoro
  misc_feature (11)..(12): deoxy
  misc_feature (13)..(13): 2'-deoxy-2'-fluoro
  misc_feature (14)..(14): deoxy
  misc_feature (15)..(17): 2'-deoxy-2'-fluoro
  misc_feature (18)..(19): deoxy
  misc_feature (20)..(20): n is thymidine
  misc_feature (21)..(21): 3'-3 attached terminal deoxyabasic moiety
gcauggaccuaacauucgann

SEQ ID NO: 2060 - RNA, 21 nt, Artificial Sequence
  Description of Artificial Sequence:  siNA sense region
  misc_feature (1)..(1): 5'-3 attached terminal deoxyabasic moiety
  misc_feature (1)..(1): deoxy
  misc_feature (2)..(2): 2'-deoxy-2'-fluoro
  misc_feature (3)..(5): deoxy
  misc_feature (6)..(8): 2'-deoxy-2'-fluoro
  misc_feature (9)..(10): deoxy
  misc_feature (11)..(11): 2'-deoxy-2'-fluoro
  misc_feature (12)..(12): deoxy
  misc_feature (13)..(15): 2'-deoxy-2'-fluoro
  misc_feature (16)..(17): deoxy
  misc_feature (18)..(19): 2'-deoxy-2'-fluoro
  misc_feature (20)..(20): n is thymidine
  misc_feature (21)..(21): 3'-3 attached terminal deoxyabasic moiety
auggaccuaacauucgaucnn

SEQ ID NO: 2061 - RNA, 21 nt, Artificial Sequence
  Description of Artificial Sequence:  siNA sense region
  misc_feature (1)..(4): 2'-deoxy-2'-fluoro
  misc_feature (5)..(10): deoxy
  misc_feature (11)..(12): 2'-deoxy-2'-fluoro
  misc_feature (13)..(13): deoxy
  misc_feature (14)..(14): 2'-deoxy-2'-fluoro
  misc_feature (15)..(16): deoxy
  misc_feature (17)..(18): 2'-deoxy-2'-fluoro
  misc_feature (19)..(19): deoxy
  misc_feature (20)..(21): internucleotide phosphorothioate linkage
cuuugaaaagucgcggucann

SEQ ID NO: 2062 - RNA, 21 nt, Artificial Sequence
  Description of Artificial Sequence:  siNA sense region
  misc_feature (1)..(2): deoxy
  misc_feature (3)..(4): 2'-deoxy-2'-fluoro
  misc_feature (5)..(8): deoxy
  misc_feature (9)..(10): 2'-deoxy-2'-fluoro
  misc_feature (11)..(11): deoxy
  misc_feature (12)..(13): 2'-deoxy-2'-fluoro
  misc_feature (14)..(17): deoxy
  misc_feature (18)..(19): 2'-deoxy-2'-fluoro
  misc_feature (20)..(21): internucleotide phosphorothioate linkage
gguugaaguugcugagguunn

SEQ ID NO: 2063 - RNA, 21 nt, Artificial Sequence
  Description of Artificial Sequence:  siNA sense region
  misc_feature (1)..(3): deoxy
  misc_feature (4)..(5): 2'-deoxy-2'-fluoro
  misc_feature (6)..(9): deoxy
  misc_feature (10)..(11): 2'-deoxy-2'-fluoro
  misc_feature (12)..(12): deoxy
  misc_feature (13)..(14): 2'-deoxy-2'-fluoro
  misc_feature (15)..(18): deoxy
  misc_feature (19)..(19): 2'-deoxy-2'-fluoro
  misc_feature (20)..(21): internucleotide phosphorothioate linkage
ggguugaaguugcugaggunn

SEQ ID NO: 2064 - RNA, 21 nt, Artificial Sequence
  Description of Artificial Sequence:  siNA sense region
  misc_feature (1)..(2): 2'-deoxy-2'-fluoro
  misc_feature (3)..(6): deoxy
  misc_feature (7)..(11): 2'-deoxy-2'-fluoro
  misc_feature (12)..(12): deoxy
  misc_feature (13)..(19): 2'-deoxy-2'-fluoro
  misc_feature (20)..(21): internucleotide phosphorothioate linkage
ucaagguuuucacuuuuucnn

SEQ ID NO: 2065 - RNA, 21 nt, Artificial Sequence
  Description of Artificial Sequence:  siNA sense region
  misc_feature (1)..(3): 2'-deoxy-2'-fluoro
  misc_feature (4)..(7): deoxy
  misc_feature (8)..(12): 2'-deoxy-2'-fluoro
  misc_feature (13)..(13): deoxy
  misc_feature (14)..(19): 2'-deoxy-2'-fluoro
  misc_feature (20)..(21): internucleotide phosphorothioate linkage
uucaagguuuucacuuuuunn

SEQ ID NO: 2066 - RNA, 21 nt, Artificial Sequence
  Description of Artificial Sequence:  siNA sense region
  misc_feature (1)..(2): 2'-deoxy-2'-fluoro
  misc_feature (3)..(3): deoxy
  misc_feature (4)..(4): 2'-deoxy-2'-fluoro
  misc_feature (5)..(5): deoxy
  misc_feature (6)..(7): 2'-deoxy-2'-fluoro
  misc_feature (8)..(11): 2'-deoxy-2'-fluoro
  misc_feature (8)..(8): deoxy
  misc_feature (12)..(12): deoxy
  misc_feature (13)..(18): 2'-deoxy-2'-fluoro
  misc_feature (19)..(19): deoxy
  misc_feature (20)..(21): internucleotide phosphorothioate linkage
cugugccaccuguucccugnn

SEQ ID NO: 2067 - RNA, 21 nt, Artificial Sequence
  Description of Artificial Sequence:  siNA sense region
  misc_feature (1)..(1): deoxy
  misc_feature (2)..(2): 2'-deoxy-2'-fluoro
  misc_feature (3)..(3): deoxy
  misc_feature (4)..(4): 2'-deoxy-2'-fluoro
  misc_feature (5)..(6): deoxy
  misc_feature (7)..(9): 2'-deoxy-2'-fluoro
  misc_feature (10)..(10): deoxy
  misc_feature (11)..(11): 2'-deoxy-2'-fluoro
  misc_feature (12)..(13): deoxy
  misc_feature (14)..(19): 2'-deoxy-2'-fluoro
  misc_feature (20)..(21): internucleotide phosphorothioate linkage
acgugguucaugacuuucunn

SEQ ID NO: 2068 - RNA, 21 nt, Artificial Sequence
  Description of Artificial Sequence:  siNA sense region
  misc_feature (1)..(2): deoxy
  misc_feature (3)..(3): 2'-deoxy-2'-fluoro
  misc_feature (4)..(4): deoxy
  misc_feature (5)..(5): 2'-deoxy-2'-fluoro
  misc_feature (6)..(7): deoxy
  misc_feature (8)..(10): 2'-deoxy-2'-fluoro
  misc_feature (11)..(11): deoxy
  misc_feature (12)..(12): 2'-deoxy-2'-fluoro
  misc_feature (13)..(14): deoxy
  misc_feature (15)..(19): 2'-deoxy-2'-fluoro
  misc_feature (20)..(21): internucleotide phosphorothioate linkage
aacgugguucaugacuuucnn

SEQ ID NO: 2069 - RNA, 21 nt, Artificial Sequence
  Description of Artificial Sequence:  siNA sense region
  misc_feature (1)..(2): 2'-deoxy-2'-fluoro
  misc_feature (3)..(4): deoxy
  misc_feature (5)..(5): 2'-deoxy-2'-fluoro
  misc_feature (6)..(6): deoxy
  misc_feature (7)..(7): 2'-deoxy-2'-fluoro
  misc_feature (8)..(9): deoxy
  misc_feature (10)..(12): 2'-deoxy-2'-fluoro
  misc_feature (13)..(13): deoxy
  misc_feature (14)..(14): 2'-deoxy-2'-fluoro
  misc_feature (15)..(16): deoxy
  misc_feature (17)..(19): 2'-deoxy-2'-fluoro
  misc_feature (20)..(21): internucleotide phosphorothioate linkage
uuaacgugguucaugacuunn

SEQ ID NO: 2070 - RNA, 21 nt, Artificial Sequence
  Description of Artificial Sequence:  siNA sense region
  misc_feature (1)..(2): 2'-deoxy-2'-fluoro
  misc_feature (3)..(3): deoxy
  misc_feature (4)..(5): 2'-deoxy-2'-fluoro
  misc_feature (6)..(7): deoxy
  misc_feature (8)..(8): 2'-deoxy-2'-fluoro
  misc_feature (9)..(9): deoxy
  misc_feature (10)..(10): 2'-deoxy-2'-fluoro
  misc_feature (11)..(12): deoxy
  misc_feature (13)..(15): 2'-deoxy-2'-fluoro
  misc_feature (16)..(16): deoxy
  misc_feature (17)..(17): 2'-deoxy-2'-fluoro
  misc_feature (18)..(19): deoxy
  misc_feature (20)..(21): internucleotide phosphorothioate linkage
cuguuaacgugguucaugann

SEQ ID NO: 2071 - RNA, 21 nt, Artificial Sequence
  Description of Artificial Sequence:  siNA sense region
  misc_feature (1)..(1): deoxy
  misc_feature (2)..(2): 2'-deoxy-2'-fluoro
  misc_feature (3)..(3): deoxy
  misc_feature (4)..(4): 2'-deoxy-2'-fluoro
  misc_feature (5)..(7): deoxy
  misc_feature (8)..(9): 2'-deoxy-2'-fluoro
  misc_feature (10)..(11): deoxy
  misc_feature (12)..(12): 2'-deoxy-2'-fluoro
  misc_feature (13)..(13): deoxy
  misc_feature (14)..(16): 2'-deoxy-2'-fluoro
  misc_feature (17)..(17): deoxy
  misc_feature (18)..(19): 2'-deoxy-2'-fluoro
  misc_feature (20)..(21): internucleotide phosphorothioate linkage
gcaugaguuggcacccacunn

SEQ ID NO: 2072 - RNA, 21 nt, Artificial Sequence
  Description of Artificial Sequence:  siNA sense region
  misc_feature (1)..(1): deoxy
  misc_feature (2)..(2): 2'-deoxy-2'-fluoro
  misc_feature (3)..(3): deoxy
  misc_feature (4)..(5): 2'-deoxy-2'-fluoro
  misc_feature (6)..(7): deoxy
  misc_feature (8)..(8): 2'-deoxy-2'-fluoro
  misc_feature (9)..(9): deoxy
  misc_feature (10)..(10): 2'-deoxy-2'-fluoro
  misc_feature (11)..(13): deoxy
  misc_feature (14)..(15): 2'-deoxy-2'-fluoro
  misc_feature (16)..(17): deoxy
  misc_feature (18)..(18): 2'-deoxy-2'-fluoro
  misc_feature (19)..(19): deoxy
  misc_feature (20)..(21): internucleotide phosphorothioate linkage
gcguuagcaugaguuggcann

SEQ ID NO: 2073 - RNA, 21 nt, Artificial Sequence
  Description of Artificial Sequence:  siNA sense region
  misc_feature (1)..(1): 2'-deoxy-2'-fluoro
  misc_feature (2)..(2): deoxy
  misc_feature (3)..(3): 2'-deoxy-2'-fluoro
  misc_feature (4)..(4): deoxy
  misc_feature (5)..(6): 2'-deoxy-2'-fluoro
  misc_feature (7)..(8): deoxy
  misc_feature (9)..(9): 2'-deoxy-2'-fluoro
  misc_feature (10)..(10): deoxy
  misc_feature (11)..(11): 2'-deoxy-2'-fluoro
  misc_feature (12)..(14): deoxy
  misc_feature (15)..(16): 2'-deoxy-2'-fluoro
  misc_feature (17)..(18): deoxy
  misc_feature (19)..(19): 2'-deoxy-2'-fluoro
  misc_feature (20)..(21): internucleotide phosphorothioate linkage
ugcguuagcaugaguuggcnn

SEQ ID NO: 2074 - RNA, 21 nt, Artificial Sequence
  Description of Artificial Sequence:  siNA sense region
  misc_feature (1)..(1): deoxy
  misc_feature (2)..(3): 2'-deoxy-2'-fluoro
  misc_feature (4)..(4): deoxy
  misc_feature (5)..(5): 2'-deoxy-2'-fluoro
  misc_feature (6)..(6): deoxy
  misc_feature (7)..(8): 2'-deoxy-2'-fluoro
  misc_feature (9)..(10): deoxy
  misc_feature (11)..(11): 2'-deoxy-2'-fluoro
  misc_feature (12)..(12): deoxy
  misc_feature (13)..(13): 2'-deoxy-2'-fluoro
  misc_feature (14)..(16): deoxy
  misc_feature (17)..(18): 2'-deoxy-2'-fluoro
  misc_feature (19)..(19): deoxy
  misc_feature (20)..(21): internucleotide phosphorothioate linkage
gcugcguuagcaugaguugnn

SEQ ID NO: 2075 - RNA, 21 nt, Artificial Sequence
  Description of Artificial Sequence:  siNA sense region
  misc_feature (1)..(1): 2'-deoxy-2'-fluoro
  misc_feature (2)..(2): deoxy
  misc_feature (3)..(4): 2'-deoxy-2'-fluoro
  misc_feature (5)..(5): deoxy
  misc_feature (6)..(6): 2'-deoxy-2'-fluoro
  misc_feature (7)..(7): deoxy
  misc_feature (8)..(9): 2'-deoxy-2'-fluoro
  misc_feature (10)..(11): deoxy
  misc_feature (12)..(12): 2'-deoxy-2'-fluoro
  misc_feature (13)..(13): deoxy
  misc_feature (14)..(14): 2'-deoxy-2'-fluoro
  misc_feature (15)..(17): deoxy
  misc_feature (18)..(19): 2'-deoxy-2'-fluoro
  misc_feature (20)..(21): internucleotide phosphorothioate linkage
ugcugcguuagcaugaguunn

SEQ ID NO: 2076 - RNA, 21 nt, Artificial Sequence
  Description of Artificial Sequence:  siNA sense region
  misc_feature (1)..(2): 2'-deoxy-2'-fluoro
  misc_feature (3)..(3): deoxy
  misc_feature (4)..(5): 2'-deoxy-2'-fluoro
  misc_feature (6)..(6): deoxy
  misc_feature (7)..(7): 2'-deoxy-2'-fluoro
  misc_feature (8)..(8): deoxy
  misc_feature (9)..(10): 2'-deoxy-2'-fluoro
  misc_feature (11)..(12): deoxy
  misc_feature (13)..(13): 2'-deoxy-2'-fluoro
  misc_feature (14)..(14): deoxy
  misc_feature (15)..(15): 2'-deoxy-2'-fluoro
  misc_feature (16)..(18): deoxy
  misc_feature (19)..(19): 2'-deoxy-2'-fluoro
  misc_feature (20)..(21): internucleotide phosphorothioate linkage
cugcugcguuagcaugagunn

SEQ ID NO: 2077 - RNA, 21 nt, Artificial Sequence
  Description of Artificial Sequence:  siNA sense region
  misc_feature (1)..(1): deoxy
  misc_feature (2)..(2): 2'-deoxy-2'-fluoro
  misc_feature (3)..(3): deoxy
  misc_feature (4)..(4): 2'-deoxy-2'-fluoro
  misc_feature (5)..(6): deoxy
  misc_feature (7)..(11): 2'-deoxy-2'-fluoro
  misc_feature (12)..(13): deoxy
  misc_feature (14)..(15): 2'-deoxy-2'-fluoro
  misc_feature (16)..(17): deoxy
  misc_feature (18)..(18): 2'-deoxy-2'-fluoro
  misc_feature (19)..(19): deoxy
  misc_feature (20)..(21): internucleotide phosphorothioate linkage
augcaguucuuggucaaugnn

SEQ ID NO: 2078 - RNA, 21 nt, Artificial Sequence
  Description of Artificial Sequence:  siNA sense region
  misc_feature (1)..(1): 2'-deoxy-2'-fluoro
  misc_feature (2)..(2): deoxy
  misc_feature (3)..(3): 2'-deoxy-2'-fluoro
  misc_feature (4)..(4): deoxy
  misc_feature (5)..(5): 2'-deoxy-2'-fluoro
  misc_feature (6)..(7): deoxy
  misc_feature (8)..(12): 2'-deoxy-2'-fluoro
  misc_feature (13)..(14): deoxy
  misc_feature (15)..(16): 2'-deoxy-2'-fluoro
  misc_feature (17)..(18): deoxy
  misc_feature (19)..(19): 2'-deoxy-2'-fluoro
  misc_feature (20)..(21): internucleotide phosphorothioate linkage
caugcaguucuuggucaaunn

SEQ ID NO: 2079 - RNA, 21 nt, Artificial Sequence
  Description of Artificial Sequence:  siNA sense region
  misc_feature (1)..(2): 2'-deoxy-2'-fluoro
  misc_feature (3)..(3): deoxy
  misc_feature (4)..(4): 2'-deoxy-2'-fluoro
  misc_feature (5)..(5): deoxy
  misc_feature (6)..(6): 2'-deoxy-2'-fluoro
  misc_feature (7)..(8): deoxy
  misc_feature (9)..(13): 2'-deoxy-2'-fluoro
  misc_feature (14)..(15): deoxy
  misc_feature (16)..(17): 2'-deoxy-2'-fluoro
  misc_feature (18)..(19): deoxy
  misc_feature (20)..(21): internucleotide phosphorothioate linkage
ccaugcaguucuuggucaann

SEQ ID NO: 2080 - RNA, 21 nt, Artificial Sequence
  Description of Artificial Sequence:  siNA sense region
  misc_feature (1)..(3): 2'-deoxy-2'-fluoro
  misc_feature (4)..(4): deoxy
  misc_feature (5)..(5): 2'-deoxy-2'-fluoro
  misc_feature (6)..(6): deoxy
  misc_feature (7)..(7): 2'-deoxy-2'-fluoro
  misc_feature (8)..(9): deoxy
  misc_feature (10)..(14): 2'-deoxy-2'-fluoro
  misc_feature (15)..(16): deoxy
  misc_feature (17)..(18): 2'-deoxy-2'-fluoro
  misc_feature (19)..(19): deoxy
  misc_feature (20)..(21): internucleotide phosphorothioate linkage
uccaugcaguucuuggucann

SEQ ID NO: 2081 - RNA, 21 nt, Artificial Sequence
  Description of Artificial Sequence:  siNA sense region
  misc_feature (1)..(2): deoxy
  misc_feature (3)..(5): 2'-deoxy-2'-fluoro
  misc_feature (6)..(6): deoxy
  misc_feature (7)..(7): 2'-deoxy-2'-fluoro
  misc_feature (8)..(8): deoxy
  misc_feature (9)..(9): 2'-deoxy-2'-fluoro
  misc_feature (10)..(11): deoxy
  misc_feature (12)..(16): 2'-deoxy-2'-fluoro
  misc_feature (17)..(18): deoxy
  misc_feature (19)..(19): 2'-deoxy-2'-fluoro
  misc_feature (20)..(21): internucleotide phosphorothioate linkage
gguccaugcaguucuuggunn

SEQ ID NO: 2082 - RNA, 21 nt, Artificial Sequence
  Description of Artificial Sequence:  siNA sense region
  misc_feature (1)..(1): 2'-deoxy-2'-fluoro
  misc_feature (2)..(4): deoxy
  misc_feature (5)..(7): 2'-deoxy-2'-fluoro
  misc_feature (8)..(8): deoxy
  misc_feature (9)..(9): 2'-deoxy-2'-fluoro
  misc_feature (10)..(10): deoxy
  misc_feature (11)..(11): 2'-deoxy-2'-fluoro
  misc_feature (12)..(13): deoxy
  misc_feature (14)..(18): 2'-deoxy-2'-fluoro
  misc_feature (19)..(19): deoxy
  misc_feature (20)..(21): internucleotide phosphorothioate linkage
uagguccaugcaguucuugnn

SEQ ID NO: 2083 - RNA, 21 nt, Artificial Sequence
  Description of Artificial Sequence:  siNA sense region
  misc_feature (1)..(1): deoxy
  misc_feature (2)..(3): 2'-deoxy-2'-fluoro
  misc_feature (4)..(6): deoxy
  misc_feature (7)..(9): 2'-deoxy-2'-fluoro
  misc_feature (10)..(10): deoxy
  misc_feature (11)..(11): 2'-deoxy-2'-fluoro
  misc_feature (12)..(12): deoxy
  misc_feature (13)..(13): 2'-deoxy-2'-fluoro
  misc_feature (14)..(15): deoxy
  misc_feature (16)..(19): 2'-deoxy-2'-fluoro
  misc_feature (20)..(21): internucleotide phosphorothioate linkage
guuagguccaugcaguucunn

SEQ ID NO: 2084 - RNA, 21 nt, Artificial Sequence
  Description of Artificial Sequence:  siNA sense region
  misc_feature (1)..(1): deoxy
  misc_feature (2)..(2): 2'-deoxy-2'-fluoro
  misc_feature (3)..(3): deoxy
  misc_feature (4)..(5): 2'-deoxy-2'-fluoro
  misc_feature (6)..(8): deoxy
  misc_feature (9)..(11): 2'-deoxy-2'-fluoro
  misc_feature (12)..(12): deoxy
  misc_feature (13)..(13): 2'-deoxy-2'-fluoro
  misc_feature (14)..(14): deoxy
  misc_feature (15)..(15): 2'-deoxy-2'-fluoro
  misc_feature (16)..(17): deoxy
  misc_feature (18)..(19): 2'-deoxy-2'-fluoro
  misc_feature (20)..(21): internucleotide phosphorothioate linkage
auguuagguccaugcaguunn

SEQ ID NO: 2085 - RNA, 21 nt, Artificial Sequence
  Description of Artificial Sequence:  siNA sense region
  misc_feature (1)..(2): deoxy
  misc_feature (3)..(3): 2'-deoxy-2'-fluoro
  misc_feature (4)..(4): deoxy
  misc_feature (5)..(6): 2'-deoxy-2'-fluoro
  misc_feature (7)..(9): deoxy
  misc_feature (10)..(12): 2'-deoxy-2'-fluoro
  misc_feature (13)..(13): deoxy
  misc_feature (14)..(14): 2'-deoxy-2'-fluoro
  misc_feature (15)..(15): deoxy
  misc_feature (16)..(16): 2'-deoxy-2'-fluoro
  misc_feature (17)..(18): deoxy
  misc_feature (19)..(19): 2'-deoxy-2'-fluoro
  misc_feature (20)..(21): internucleotide phosphorothioate linkage
aauguuagguccaugcagunn

SEQ ID NO: 2086 - RNA, 21 nt, Artificial Sequence
  Description of Artificial Sequence:  siNA sense region
  misc_feature (1)..(3): deoxy
  misc_feature (4)..(4): 2'-deoxy-2'-fluoro
  misc_feature (5)..(5): deoxy
  misc_feature (6)..(7): 2'-deoxy-2'-fluoro
  misc_feature (8)..(10): deoxy
  misc_feature (11)..(13): 2'-deoxy-2'-fluoro
  misc_feature (14)..(14): deoxy
  misc_feature (15)..(15): 2'-deoxy-2'-fluoro
  misc_feature (16)..(16): deoxy
  misc_feature (17)..(17): 2'-deoxy-2'-fluoro
  misc_feature (18)..(19): deoxy
  misc_feature (20)..(21): internucleotide phosphorothioate linkage
gaauguuagguccaugcagnn

SEQ ID NO: 2087 - RNA, 21 nt, Artificial Sequence
  Description of Artificial Sequence:  siNA sense region
  misc_feature (1)..(2): 2'-deoxy-2'-fluoro
  misc_feature (3)..(5): deoxy
  misc_feature (6)..(6): 2'-deoxy-2'-fluoro
  misc_feature (7)..(7): deoxy
  misc_feature (8)..(9): 2'-deoxy-2'-fluoro
  misc_feature (10)..(12): deoxy
  misc_feature (13)..(15): 2'-deoxy-2'-fluoro
  misc_feature (16)..(16): deoxy
  misc_feature (17)..(17): 2'-deoxy-2'-fluoro
  misc_feature (18)..(18): deoxy
  misc_feature (19)..(19): 2'-deoxy-2'-fluoro
  misc_feature (20)..(21): internucleotide phosphorothioate linkage
ucgaauguuagguccaugcnn

SEQ ID NO: 2088 - RNA, 21 nt, Artificial Sequence
  Description of Artificial Sequence:  siNA sense region
  misc_feature (1)..(2): deoxy
  misc_feature (3)..(4): 2'-deoxy-2'-fluoro
  misc_feature (5)..(7): deoxy
  misc_feature (8)..(8): 2'-deoxy-2'-fluoro
  misc_feature (9)..(9): deoxy
  misc_feature (10)..(11): 2'-deoxy-2'-fluoro
  misc_feature (12)..(14): deoxy
  misc_feature (15)..(17): 2'-deoxy-2'-fluoro
  misc_feature (18)..(18): deoxy
  misc_feature (19)..(19): 2'-deoxy-2'-fluoro
  misc_feature (20)..(21): internucleotide phosphorothioate linkage
gaucgaauguuagguccaunn

SEQ ID NO: 2089 - RNA, 21 nt, Artificial Sequence
  Description of Artificial Sequence:  siNA sense region
  misc_feature (1)..(1): 5'-3 attached terminal deoxyabasic moiety
  misc_feature (1)..(1): 2'-deoxy-2'-fluoro
  misc_feature (2)..(3): 2'-O-methyl
  misc_feature (4)..(5): 2'-deoxy-2'-fluoro
  misc_feature (6)..(6): 2'-O-methyl
  misc_feature (7)..(7): 2'-deoxy-2'-fluoro
  misc_feature (8)..(9): 2'-O-methyl
  misc_feature (10)..(15): 2'-deoxy-2'-fluoro
  misc_feature (16)..(19): 2'-O-methyl
  misc_feature (20)..(20): n is thymidine
  misc_feature (21)..(21): 3'-3 attached terminal deoxyabasic moiety
ugaccgcgacuuuucaaagnn

SEQ ID NO: 2090 - RNA, 21 nt, Artificial Sequence
  Description of Artificial Sequence:  siNA sense region
  misc_feature (1)..(1): 5'-3 attached terminal deoxyabasic moiety
  misc_feature (1)..(2): 2'-O-methyl
  misc_feature (3)..(6): 2'-deoxy-2'-fluoro
  misc_feature (7)..(8): 2'-O-methyl
  misc_feature (9)..(9): 2'-deoxy-2'-fluoro
  misc_feature (10)..(11): 2'-O-methyl
  misc_feature (12)..(15): 2'-deoxy-2'-fluoro
  misc_feature (16)..(17): 2'-O-methyl
  misc_feature (18)..(19): 2'-deoxy-2'-fluoro
  misc_feature (20)..(20): n is thymidine
  misc_feature (21)..(21): 3'-3 attached terminal deoxyabasic moiety
aaccucagcaacuucaaccnn

SEQ ID NO: 2091 - RNA, 21 nt, Artificial Sequence
  Description of Artificial Sequence:  siNA sense region
  misc_feature (1)..(1): 5'-3 attached terminal deoxyabasic moiety
  misc_feature (1)..(1): 2'-O-methyl
  misc_feature (2)..(5): 2'-deoxy-2'-fluoro
  misc_feature (6)..(7): 2'-O-methyl
  misc_feature (8)..(8): 2'-deoxy-2'-fluoro
  misc_feature (9)..(10): 2'-O-methyl
  misc_feature (11)..(14): 2'-deoxy-2'-fluoro
  misc_feature (15)..(16): 2'-O-methyl
  misc_feature (17)..(19): 2'-deoxy-2'-fluoro
  misc_feature (20)..(20): n is thymidine
  misc_feature (21)..(21): 3'-3 attached terminal deoxyabasic moiety
accucagcaacuucaacccnn

SEQ ID NO: 2092 - RNA, 21 nt, Artificial Sequence
  Description of Artificial Sequence:  siNA sense region
  misc_feature (1)..(1): 5'-3 attached terminal deoxyabasic moiety
  misc_feature (1)..(7): 2'-O-methyl
  misc_feature (8)..(8): 2'-deoxy-2'-fluoro
  misc_feature (9)..(13): 2'-O-methyl
  misc_feature (14)..(17): 2'-deoxy-2'-fluoro
  misc_feature (18)..(19): 2'-O-methyl
  misc_feature (20)..(20): n is thymidine
  misc_feature (21)..(21): 3'-3 attached terminal deoxyabasic moiety
gaaaaagugaaaaccuugann

SEQ ID NO: 2093 - RNA, 21 nt, Artificial Sequence
  Description of Artificial Sequence:  siNA sense region
  misc_feature (1)..(1): 5'-3 attached terminal deoxyabasic moiety
  misc_feature (1)..(6): 2'-O-methyl
  misc_feature (7)..(7): 2'-deoxy-2'-fluoro
  misc_feature (8)..(12): 2'-O-methyl
  misc_feature (13)..(16): 2'-deoxy-2'-fluoro
  misc_feature (17)..(19): 2'-O-methyl
  misc_feature (20)..(20): n is thymidine
  misc_feature (21)..(21): 3'-3 attached terminal deoxyabasic moiety
aaaaagugaaaaccuugaann

SEQ ID NO: 2094 - RNA, 21 nt, Artificial Sequence
  Description of Artificial Sequence:  siNA sense region
  misc_feature (1)..(1): 5'-3 attached terminal deoxyabasic moiety
  misc_feature (1)..(1): 2'-deoxy-2'-fluoro
  misc_feature (2)..(7): 2'-O-methyl
  misc_feature (8)..(8): 2'-deoxy-2'-fluoro
  misc_feature (9)..(11): 2'-O-methyl
  misc_feature (12)..(12): 2'-deoxy-2'-fluoro
  misc_feature (13)..(14): 2'-O-methyl
  misc_feature (15)..(15): 2'-deoxy-2'-fluoro
  misc_feature (16)..(16): 2'-O-methyl
  misc_feature (17)..(17): 2'-deoxy-2'-fluoro
  misc_feature (18)..(19): 2'-O-methyl
  misc_feature (20)..(20): n is thymidine
  misc_feature (21)..(21): 3'-3 attached terminal deoxyabasic moiety
cagggaacagguggcacagnn

SEQ ID NO: 2095 - RNA, 21 nt, Artificial Sequence
  Description of Artificial Sequence:  siNA sense region
  misc_feature (1)..(1): 5'-3 attached terminal deoxyabasic moiety
  misc_feature (1)..(6): 2'-O-methyl
  misc_feature (7)..(8): 2'-deoxy-2'-fluoro
  misc_feature (9)..(9): 2'-O-methyl
  misc_feature (10)..(10): 2'-deoxy-2'-fluoro
  misc_feature (11)..(13): 2'-O-methyl
  misc_feature (14)..(15): 2'-deoxy-2'-fluoro
  misc_feature (16)..(16): 2'-O-methyl
  misc_feature (17)..(17): 2'-deoxy-2'-fluoro
  misc_feature (18)..(18): 2'-O-methyl
  misc_feature (19)..(19): 2'-deoxy-2'-fluoro
  misc_feature (20)..(20): n is thymidine
  misc_feature (21)..(21): 3'-3 attached terminal deoxyabasic moiety
agaaagucaugaaccacgunn

SEQ ID NO: 2096 - RNA, 21 nt, Artificial Sequence
  Description of Artificial Sequence:  siNA sense region
  misc_feature (1)..(1): 5'-3 attached terminal deoxyabasic moiety
  misc_feature (1)..(5): 2'-O-methyl
  misc_feature (6)..(7): 2'-deoxy-2'-fluoro
  misc_feature (8)..(8): 2'-O-methyl
  misc_feature (9)..(9): 2'-deoxy-2'-fluoro
  misc_feature (10)..(12): 2'-O-methyl
  misc_feature (13)..(14): 2'-deoxy-2'-fluoro
  misc_feature (15)..(15): 2'-O-methyl
  misc_feature (16)..(16): 2'-deoxy-2'-fluoro
  misc_feature (17)..(17): 2'-O-methyl
  misc_feature (18)..(19): 2'-deoxy-2'-fluoro
  misc_feature (20)..(20): n is thymidine
  misc_feature (21)..(21): 3'-3 attached terminal deoxyabasic moiety
gaaagucaugaaccacguunn

SEQ ID NO: 2097 - RNA, 21 nt, Artificial Sequence
  Description of Artificial Sequence:  siNA sense region
  misc_feature (1)..(1): 5'-3 attached terminal deoxyabasic moiety
  misc_feature (1)..(3): 2'-O-methyl
  misc_feature (4)..(5): 2'-deoxy-2'-fluoro
  misc_feature (6)..(6): 2'-O-methyl
  misc_feature (7)..(7): 2'-deoxy-2'-fluoro
  misc_feature (8)..(10): 2'-O-methyl
  misc_feature (11)..(12): 2'-deoxy-2'-fluoro
  misc_feature (13)..(13): 2'-O-methyl
  misc_feature (14)..(14): 2'-deoxy-2'-fluoro
  misc_feature (15)..(15): 2'-O-methyl
  misc_feature (16)..(17): 2'-deoxy-2'-fluoro
  misc_feature (18)..(19): 2'-O-methyl
  misc_feature (20)..(20): n is thymidine
  misc_feature (21)..(21): 3'-3 attached terminal deoxyabasic moiety
aagucaugaaccacguuaann

SEQ ID NO: 2098 - RNA, 21 nt, Artificial Sequence
  Description of Artificial Sequence:  siNA sense region
  misc_feature (1)..(1): 5'-3 attached terminal deoxyabasic moiety
  misc_feature (1)..(2): 2'-deoxy-2'-fluoro
  misc_feature (3)..(3): 2'-O-methyl
  misc_feature (4)..(4): 2'-deoxy-2'-fluoro
  misc_feature (5)..(7): 2'-O-methyl
  misc_feature (8)..(9): 2'-deoxy-2'-fluoro
  misc_feature (10)..(10): 2'-O-methyl
  misc_feature (11)..(11): 2'-deoxy-2'-fluoro
  misc_feature (12)..(12): 2'-O-methyl
  misc_feature (13)..(14): 2'-deoxy-2'-fluoro
  misc_feature (15)..(16): 2'-O-methyl
  misc_feature (17)..(17): 2'-deoxy-2'-fluoro
  misc_feature (18)..(19): 2'-O-methyl
  misc_feature (20)..(20): n is thymidine
  misc_feature (21)..(21): 3'-3 attached terminal deoxyabasic moiety
ucaugaaccacguuaacagnn

SEQ ID NO: 2099 - RNA, 21 nt, Artificial Sequence
  Description of Artificial Sequence:  siNA sense region
  misc_feature (1)..(1): 5'-3 attached terminal deoxyabasic moiety
  misc_feature (1)..(2): 2'-O-methyl
  misc_feature (3)..(3): 2'-deoxy-2'-fluoro
  misc_feature (4)..(6): 2'-O-methyl
  misc_feature (7)..(7): 2'-deoxy-2'-fluoro
  misc_feature (8)..(8): 2'-O-methyl
  misc_feature (9)..(10): 2'-deoxy-2'-fluoro
  misc_feature (11)..(12): 2'-O-methyl
  misc_feature (13)..(15): 2'-deoxy-2'-fluoro
  misc_feature (16)..(16): 2'-O-methyl
  misc_feature (17)..(17): 2'-deoxy-2'-fluoro
  misc_feature (18)..(18): 2'-O-methyl
  misc_feature (19)..(19): 2'-deoxy-2'-fluoro
  misc_feature (20)..(20): n is thymidine
  misc_feature (21)..(21): 3'-3 attached terminal deoxyabasic moiety
agugggugccaacucaugcnn

SEQ ID NO: 2100 - RNA, 21 nt, Artificial Sequence
  Description of Artificial Sequence:  siNA sense region
  misc_feature (1)..(1): 5'-3 attached terminal deoxyabasic moiety
  misc_feature (1)..(1): 2'-deoxy-2'-fluoro
  misc_feature (2)..(2): 2'-O-methyl
  misc_feature (3)..(4): 2'-deoxy-2'-fluoro
  misc_feature (5)..(6): 2'-O-methyl
  misc_feature (7)..(9): 2'-deoxy-2'-fluoro
  misc_feature (10)..(10): 2'-O-methyl
  misc_feature (11)..(11): 2'-deoxy-2'-fluoro
  misc_feature (12)..(12): 2'-O-methyl
  misc_feature (13)..(14): 2'-deoxy-2'-fluoro
  misc_feature (15)..(16): 2'-O-methyl
  misc_feature (17)..(17): 2'-deoxy-2'-fluoro
  misc_feature (18)..(18): 2'-O-methyl
  misc_feature (19)..(19): 2'-deoxy-2'-fluoro
  misc_feature (20)..(20): n is thymidine
  misc_feature (21)..(21): 3'-3 attached terminal deoxyabasic moiety
ugccaacucaugcuaacgcnn

SEQ ID NO: 2101 - RNA, 21 nt, Artificial Sequence
  Description of Artificial Sequence:  siNA sense region
  misc_feature (1)..(1): 5'-3 attached terminal deoxyabasic moiety
  misc_feature (1)..(1): 2'-O-methyl
  misc_feature (2)..(3): 2'-deoxy-2'-fluoro
  misc_feature (4)..(5): 2'-O-methyl
  misc_feature (6)..(8): 2'-deoxy-2'-fluoro
  misc_feature (9)..(9): 2'-O-methyl
  misc_feature (10)..(10): 2'-deoxy-2'-fluoro
  misc_feature (11)..(11): 2'-O-methyl
  misc_feature (12)..(13): 2'-deoxy-2'-fluoro
  misc_feature (14)..(15): 2'-O-methyl
  misc_feature (16)..(16): 2'-deoxy-2'-fluoro
  misc_feature (17)..(17): 2'-O-methyl
  misc_feature (18)..(18): 2'-deoxy-2'-fluoro
  misc_feature (19)..(19): 2'-O-methyl
  misc_feature (20)..(20): n is thymidine
  misc_feature (21)..(21): 3'-3 attached terminal deoxyabasic moiety
gccaacucaugcuaacgcann

SEQ ID NO: 2102 - RNA, 21 nt, Artificial Sequence
  Description of Artificial Sequence:  siNA sense region
  misc_feature (1)..(1): 5'-3 attached terminal deoxyabasic moiety
  misc_feature (1)..(1): 2'-deoxy-2'-fluoro
  misc_feature (2)..(3): 2'-O-methyl
  misc_feature (4)..(6): 2'-deoxy-2'-fluoro
  misc_feature (7)..(7): 2'-O-methyl
  misc_feature (8)..(8): 2'-deoxy-2'-fluoro
  misc_feature (9)..(9): 2'-O-methyl
  misc_feature (10)..(11): 2'-deoxy-2'-fluoro
  misc_feature (12)..(13): 2'-O-methyl
  misc_feature (14)..(14): 2'-deoxy-2'-fluoro
  misc_feature (15)..(15): 2'-O-methyl
  misc_feature (16)..(16): 2'-deoxy-2'-fluoro
  misc_feature (17)..(18): 2'-O-methyl
  misc_feature (19)..(19): 2'-deoxy-2'-fluoro
  misc_feature (20)..(20): n is thymidine
  misc_feature (21)..(21): 3'-3 attached terminal deoxyabasic moiety
caacucaugcuaacgcagcnn

SEQ ID NO: 2103 - RNA, 21 nt, Artificial Sequence
  Description of Artificial Sequence:  siNA sense region
  misc_feature (1)..(1): 5'-3 attached terminal deoxyabasic moiety
  misc_feature (1)..(2): 2'-O-methyl
  misc_feature (3)..(5): 2'-deoxy-2'-fluoro
  misc_feature (6)..(6): 2'-O-methyl
  misc_feature (7)..(7): 2'-deoxy-2'-fluoro
  misc_feature (8)..(8): 2'-O-methyl
  misc_feature (9)..(10): 2'-deoxy-2'-fluoro
  misc_feature (11)..(12): 2'-O-methyl
  misc_feature (13)..(13): 2'-deoxy-2'-fluoro
  misc_feature (14)..(14): 2'-O-methyl
  misc_feature (15)..(15): 2'-deoxy-2'-fluoro
  misc_feature (16)..(17): 2'-O-methyl
  misc_feature (18)..(18): 2'-deoxy-2'-fluoro
  misc_feature (19)..(19): 2'-O-methyl
  misc_feature (20)..(20): n is thymidine
  misc_feature (21)..(21): 3'-3 attached terminal deoxyabasic moiety
aacucaugcuaacgcagcann

SEQ ID NO: 2104 - RNA, 21 nt, Artificial Sequence
  Description of Artificial Sequence:  siNA sense region
  misc_feature (1)..(1): 5'-3 attached terminal deoxyabasic moiety
  misc_feature (1)..(1): 2'-O-methyl
  misc_feature (2)..(4): 2'-deoxy-2'-fluoro
  misc_feature (5)..(5): 2'-O-methyl
  misc_feature (6)..(6): 2'-deoxy-2'-fluoro
  misc_feature (7)..(7): 2'-O-methyl
  misc_feature (8)..(9): 2'-deoxy-2'-fluoro
  misc_feature (10)..(11): 2'-O-methyl
  misc_feature (12)..(12): 2'-deoxy-2'-fluoro
  misc_feature (13)..(13): 2'-O-methyl
  misc_feature (14)..(14): 2'-deoxy-2'-fluoro
  misc_feature (15)..(16): 2'-O-methyl
  misc_feature (17)..(17): 2'-deoxy-2'-fluoro
  misc_feature (18)..(19): 2'-O-methyl
  misc_feature (20)..(20): n is thymidine
  misc_feature (21)..(21): 3'-3 attached terminal deoxyabasic moiety
acucaugcuaacgcagcagnn

SEQ ID NO: 2105 - RNA, 21 nt, Artificial Sequence
  Description of Artificial Sequence:  siNA sense region
  misc_feature (1)..(1): 5'-3 attached terminal deoxyabasic moiety
  misc_feature (1)..(1): 2'-deoxy-2'-fluoro
  misc_feature (2)..(2): 2'-O-methyl
  misc_feature (3)..(4): 2'-deoxy-2'-fluoro
  misc_feature (5)..(6): 2'-O-methyl
  misc_feature (7)..(8): 2'-deoxy-2'-fluoro
  misc_feature (9)..(13): 2'-O-methyl
  misc_feature (14)..(15): 2'-deoxy-2'-fluoro
  misc_feature (16)..(16): 2'-O-methyl
  misc_feature (17)..(17): 2'-deoxy-2'-fluoro
  misc_feature (18)..(18): 2'-O-methyl
  misc_feature (19)..(19): 2'-deoxy-2'-fluoro
  misc_feature (20)..(20): n is thymidine
  misc_feature (21)..(21): 3'-3 attached terminal deoxyabasic moiety
cauugaccaagaacugcaunn

SEQ ID NO: 2106 - RNA, 21 nt, Artificial Sequence
  Description of Artificial Sequence:  siNA sense region
  misc_feature (1)..(1): 5'-3 attached terminal deoxyabasic moiety
  misc_feature (1)..(1): 2'-O-methyl
  misc_feature (2)..(3): 2'-deoxy-2'-fluoro
  misc_feature (4)..(5): 2'-O-methyl
  misc_feature (6)..(7): 2'-deoxy-2'-fluoro
  misc_feature (8)..(12): 2'-O-methyl
  misc_feature (13)..(14): 2'-deoxy-2'-fluoro
  misc_feature (15)..(15): 2'-O-methyl
  misc_feature (16)..(16): 2'-deoxy-2'-fluoro
  misc_feature (17)..(17): 2'-O-methyl
  misc_feature (18)..(18): 2'-deoxy-2'-fluoro
  misc_feature (19)..(19): 2'-O-methyl
  misc_feature (20)..(20): n is thymidine
  misc_feature (21)..(21): 3'-3 attached terminal deoxyabasic moiety
auugaccaagaacugcaugnn

SEQ ID NO: 2107 - RNA, 21 nt, Artificial Sequence
  Description of Artificial Sequence:  siNA sense region
  misc_feature (1)..(1): 5'-3 attached terminal deoxyabasic moiety
  misc_feature (1)..(2): 2'-deoxy-2'-fluoro
  misc_feature (3)..(4): 2'-O-methyl
  misc_feature (5)..(6): 2'-deoxy-2'-fluoro
  misc_feature (7)..(11): 2'-O-methyl
  misc_feature (12)..(13): 2'-deoxy-2'-fluoro
  misc_feature (14)..(14): 2'-O-methyl
  misc_feature (15)..(15): 2'-deoxy-2'-fluoro
  misc_feature (16)..(16): 2'-O-methyl
  misc_feature (17)..(17): 2'-deoxy-2'-fluoro
  misc_feature (18)..(19): 2'-O-methyl
  misc_feature (20)..(20): n is thymidine
  misc_feature (21)..(21): 3'-3 attached terminal deoxyabasic moiety
uugaccaagaacugcauggnn

SEQ ID NO: 2108 - RNA, 21 nt, Artificial Sequence
  Description of Artificial Sequence:  siNA sense region
  misc_feature (1)..(1): 5'-3 attached terminal deoxyabasic moiety
  misc_feature (1)..(1): 2'-deoxy-2'-fluoro
  misc_feature (2)..(3): 2'-O-methyl
  misc_feature (4)..(5): 2'-deoxy-2'-fluoro
  misc_feature (6)..(10): 2'-O-methyl
  misc_feature (11)..(12): 2'-deoxy-2'-fluoro
  misc_feature (13)..(13): 2'-O-methyl
  misc_feature (14)..(14): 2'-deoxy-2'-fluoro
  misc_feature (15)..(15): 2'-O-methyl
  misc_feature (16)..(16): 2'-deoxy-2'-fluoro
  misc_feature (17)..(19): 2'-O-methyl
  misc_feature (20)..(20): n is thymidine
  misc_feature (21)..(21): 3'-3 attached terminal deoxyabasic moiety
ugaccaagaacugcauggann

SEQ ID NO: 2109 - RNA, 21 nt, Artificial Sequence
  Description of Artificial Sequence:  siNA sense region
  misc_feature (1)..(1): 5'-3 attached terminal deoxyabasic moiety
  misc_feature (1)..(1): 2'-O-methyl
  misc_feature (2)..(3): 2'-deoxy-2'-fluoro
  misc_feature (4)..(8): 2'-O-methyl
  misc_feature (9)..(10): 2'-deoxy-2'-fluoro
  misc_feature (11)..(11): 2'-O-methyl
  misc_feature (12)..(12): 2'-deoxy-2'-fluoro
  misc_feature (13)..(13): 2'-O-methyl
  misc_feature (14)..(14): 2'-deoxy-2'-fluoro
  misc_feature (15)..(17): 2'-O-methyl
  misc_feature (18)..(19): 2'-deoxy-2'-fluoro
  misc_feature (20)..(20): n is thymidine
  misc_feature (21)..(21): 3'-3 attached terminal deoxyabasic moiety
accaagaacugcauggaccnn

SEQ ID NO: 2110 - RNA, 21 nt, Artificial Sequence
  Description of Artificial Sequence:  siNA sense region
  misc_feature (1)..(1): 5'-3 attached terminal deoxyabasic moiety
  misc_feature (1)..(1): 2'-deoxy-2'-fluoro
  misc_feature (2)..(6): 2'-O-methyl
  misc_feature (7)..(8): 2'-deoxy-2'-fluoro
  misc_feature (9)..(9): 2'-O-methyl
  misc_feature (10)..(10): 2'-deoxy-2'-fluoro
  misc_feature (11)..(11): 2'-O-methyl
  misc_feature (12)..(12): 2'-deoxy-2'-fluoro
  misc_feature (13)..(15): 2'-O-methyl
  misc_feature (16)..(18): 2'-deoxy-2'-fluoro
  misc_feature (19)..(19): 2'-O-methyl
  misc_feature (20)..(20): n is thymidine
  misc_feature (21)..(21): 3'-3 attached terminal deoxyabasic moiety
caagaacugcauggaccuann

SEQ ID NO: 2111 - RNA, 21 nt, Artificial Sequence
  Description of Artificial Sequence:  siNA sense region
  misc_feature (1)..(1): 5'-3 attached terminal deoxyabasic moiety
  misc_feature (1)..(4): 2'-O-methyl
  misc_feature (5)..(6): 2'-deoxy-2'-fluoro
  misc_feature (7)..(7): 2'-O-methyl
  misc_feature (8)..(8): 2'-deoxy-2'-fluoro
  misc_feature (9)..(9): 2'-O-methyl
  misc_feature (10)..(10): 2'-deoxy-2'-fluoro
  misc_feature (11)..(13): 2'-O-methyl
  misc_feature (14)..(16): 2'-deoxy-2'-fluoro
  misc_feature (17)..(18): 2'-O-methyl
  misc_feature (19)..(19): 2'-deoxy-2'-fluoro
  misc_feature (20)..(20): n is thymidine
  misc_feature (21)..(21): 3'-3 attached terminal deoxyabasic moiety
agaacugcauggaccuaacnn

SEQ ID NO: 2112 - RNA, 21 nt, Artificial Sequence
  Description of Artificial Sequence:  siNA sense region
  misc_feature (1)..(1): 5'-3 attached terminal deoxyabasic moiety
  misc_feature (1)..(2): 2'-O-methyl
  misc_feature (3)..(4): 2'-deoxy-2'-fluoro
  misc_feature (5)..(5): 2'-O-methyl
  misc_feature (6)..(6): 2'-deoxy-2'-fluoro
  misc_feature (7)..(7): 2'-O-methyl
  misc_feature (8)..(8): 2'-deoxy-2'-fluoro
  misc_feature (9)..(11): 2'-O-methyl
  misc_feature (12)..(14): 2'-deoxy-2'-fluoro
  misc_feature (15)..(16): 2'-O-methyl
  misc_feature (17)..(17): 2'-deoxy-2'-fluoro
  misc_feature (18)..(18): 2'-O-methyl
  misc_feature (19)..(19): 2'-deoxy-2'-fluoro
  misc_feature (20)..(20): n is thymidine
  misc_feature (21)..(21): 3'-3 attached terminal deoxyabasic moiety
aacugcauggaccuaacaunn

SEQ ID NO: 2113 - RNA, 21 nt, Artificial Sequence
  Description of Artificial Sequence:  siNA sense region
  misc_feature (1)..(1): 5'-3 attached terminal deoxyabasic moiety
  misc_feature (1)..(1): 2'-O-methyl
  misc_feature (2)..(3): 2'-deoxy-2'-fluoro
  misc_feature (4)..(4): 2'-O-methyl
  misc_feature (5)..(5): 2'-deoxy-2'-fluoro
  misc_feature (6)..(6): 2'-O-methyl
  misc_feature (7)..(7): 2'-deoxy-2'-fluoro
  misc_feature (8)..(10): 2'-O-methyl
  misc_feature (11)..(13): 2'-deoxy-2'-fluoro
  misc_feature (14)..(15): 2'-O-methyl
  misc_feature (16)..(16): 2'-deoxy-2'-fluoro
  misc_feature (17)..(17): 2'-O-methyl
  misc_feature (18)..(19): 2'-deoxy-2'-fluoro
  misc_feature (20)..(20): n is thymidine
  misc_feature (21)..(21): 3'-3 attached terminal deoxyabasic moiety
acugcauggaccuaacauunn

SEQ ID NO: 2114 - RNA, 21 nt, Artificial Sequence
  Description of Artificial Sequence:  siNA sense region
  misc_feature (1)..(1): 5'-3 attached terminal deoxyabasic moiety
  misc_feature (1)..(2): 2'-deoxy-2'-fluoro
  misc_feature (3)..(3): 2'-O-methyl
  misc_feature (4)..(4): 2'-deoxy-2'-fluoro
  misc_feature (5)..(5): 2'-O-methyl
  misc_feature (6)..(6): 2'-deoxy-2'-fluoro
  misc_feature (7)..(9): 2'-O-methyl
  misc_feature (10)..(12): 2'-deoxy-2'-fluoro
  misc_feature (13)..(14): 2'-O-methyl
  misc_feature (15)..(15): 2'-deoxy-2'-fluoro
  misc_feature (16)..(16): 2'-O-methyl
  misc_feature (17)..(19): 2'-deoxy-2'-fluoro
  misc_feature (20)..(20): n is thymidine
  misc_feature (21)..(21): 3'-3 attached terminal deoxyabasic moiety
cugcauggaccuaacauucnn

SEQ ID NO: 2115 - RNA, 21 nt, Artificial Sequence
  Description of Artificial Sequence:  siNA sense region
  misc_feature (1)..(1): 5'-3 attached terminal deoxyabasic moiety
  misc_feature (1)..(1): 2'-O-methyl
  misc_feature (2)..(2): 2'-deoxy-2'-fluoro
  misc_feature (3)..(3): 2'-O-methyl
  misc_feature (4)..(4): 2'-deoxy-2'-fluoro
  misc_feature (5)..(7): 2'-O-methyl
  misc_feature (8)..(10): 2'-deoxy-2'-fluoro
  misc_feature (11)..(12): 2'-O-methyl
  misc_feature (13)..(13): 2'-deoxy-2'-fluoro
  misc_feature (14)..(14): 2'-O-methyl
  misc_feature (15)..(17): 2'-deoxy-2'-fluoro
  misc_feature (18)..(19): 2'-O-methyl
  misc_feature (20)..(20): n is thymidine
  misc_feature (21)..(21): 3'-3 attached terminal deoxyabasic moiety
gcauggaccuaacauucgann

SEQ ID NO: 2116 - RNA, 21 nt, Artificial Sequence
  Description of Artificial Sequence:  siNA sense region
  misc_feature (1)..(1): 5'-3 attached terminal deoxyabasic moiety
  misc_feature (2)..(2): 2'-deoxy-2'-fluoro
  misc_feature (6)..(8): 2'-deoxy-2'-fluoro
  misc_feature (11)..(11): 2'-deoxy-2'-fluoro
  misc_feature (13)..(15): 2'-deoxy-2'-fluoro
  misc_feature (18)..(19): 2'-deoxy-2'-fluoro
  misc_feature (20)..(20): n is thymidine
  misc_feature (21)..(21): 3'-3 attached terminal deoxyabasic moiety
auggaccuaacauucgaucnn

SEQ ID NO: 2117 - RNA, 21 nt, Artificial Sequence
  Description of Artificial Sequence:  siNA sense region
  misc_feature (1)..(4): 2'-deoxy-2'-fluoro
  misc_feature (5)..(10): 2'-O-methyl
  misc_feature (11)..(12): 2'-deoxy-2'-fluoro
  misc_feature (13)..(13): 2'-O-methyl
  misc_feature (14)..(14): 2'-deoxy-2'-fluoro
  misc_feature (15)..(16): 2'-O-methyl
  misc_feature (17)..(18): 2'-deoxy-2'-fluoro
  misc_feature (19)..(19): 2'-O-methyl
  misc_feature (20)..(21): internucleotide phosphorothioate linkage
cuuugaaaagucgcggucann

SEQ ID NO: 2118 - RNA, 21 nt, Artificial Sequence
  Description of Artificial Sequence:  siNA sense region
  misc_feature (1)..(2): 2'-O-methyl
  misc_feature (3)..(4): 2'-deoxy-2'-fluoro
  misc_feature (5)..(8): 2'-O-methyl
  misc_feature (9)..(10): 2'-deoxy-2'-fluoro
  misc_feature (11)..(11): 2'-O-methyl
  misc_feature (12)..(13): 2'-deoxy-2'-fluoro
  misc_feature (14)..(17): 2'-O-methyl
  misc_feature (18)..(19): 2'-deoxy-2'-fluoro
  misc_feature (20)..(21): internucleotide phosphorothioate linkage
gguugaaguugcugagguunn

SEQ ID NO: 2119 - RNA, 21 nt, Artificial Sequence
  Description of Artificial Sequence:  siNA sense region
  misc_feature (1)..(3): 2'-O-methyl
  misc_feature (4)..(5): 2'-deoxy-2'-fluoro
  misc_feature (6)..(9): 2'-O-methyl
  misc_feature (10)..(11): 2'-deoxy-2'-fluoro
  misc_feature (12)..(12): 2'-O-methyl
  misc_feature (13)..(14): 2'-deoxy-2'-fluoro
  misc_feature (15)..(18): 2'-O-methyl
  misc_feature (19)..(19): 2'-deoxy-2'-fluoro
  misc_feature (20)..(21): internucleotide phosphorothioate linkage
ggguugaaguugcugaggunn

SEQ ID NO: 2120 - RNA, 21 nt, Artificial Sequence
  Description of Artificial Sequence:  siNA sense region
  misc_feature (1)..(2): 2'-deoxy-2'-fluoro
  misc_feature (3)..(6): 2'-O-methyl
  misc_feature (7)..(11): 2'-deoxy-2'-fluoro
  misc_feature (12)..(12): 2'-O-methyl
  misc_feature (13)..(19): 2'-deoxy-2'-fluoro
  misc_feature (20)..(21): internucleotide phosphorothioate linkage
ucaagguuuucacuuuuucnn

SEQ ID NO: 2121 - RNA, 21 nt, Artificial Sequence
  Description of Artificial Sequence:  siNA sense region
  misc_feature (1)..(3): 2'-deoxy-2'-fluoro
  misc_feature (4)..(7): 2'-O-methyl
  misc_feature (8)..(12): 2'-deoxy-2'-fluoro
  misc_feature (13)..(13): 2'-O-methyl
  misc_feature (14)..(19): 2'-deoxy-2'-fluoro
  misc_feature (20)..(21): internucleotide phosphorothioate linkage
uucaagguuuucacuuuuunn

SEQ ID NO: 2122 - RNA, 21 nt, Artificial Sequence
  Description of Artificial Sequence:  siNA sense region
  misc_feature (1)..(2): 2'-deoxy-2'-fluoro
  misc_feature (1)..(1): 2'-deoxy-2'-fluoro
  misc_feature (3)..(3): 2'-O-methyl
  misc_feature (5)..(5): 2'-O-methyl
  misc_feature (6)..(7): 2'-deoxy-2'-fluoro
  misc_feature (8)..(8): 2'-O-methyl
  misc_feature (9)..(11): 2'-deoxy-2'-fluoro
  misc_feature (12)..(12): 2'-O-methyl
  misc_feature (13)..(18): 2'-deoxy-2'-fluoro
  misc_feature (19)..(19): 2'-O-methyl
  misc_feature (20)..(21): internucleotide phosphorothioate linkage
cugugccaccuguucccugnn

SEQ ID NO: 2123 - RNA, 21 nt, Artificial Sequence
  Description of Artificial Sequence:  siNA sense region
  misc_feature (1)..(1): 2'-O-methyl
  misc_feature (2)..(2): 2'-deoxy-2'-fluoro
  misc_feature (3)..(3): 2'-O-methyl
  misc_feature (4)..(4): 2'-deoxy-2'-fluoro
  misc_feature (5)..(6): 2'-O-methyl
  misc_feature (7)..(9): 2'-deoxy-2'-fluoro
  misc_feature (10)..(10): 2'-O-methyl
  misc_feature (11)..(11): 2'-deoxy-2'-fluoro
  misc_feature (12)..(13): 2'-O-methyl
  misc_feature (14)..(19): 2'-deoxy-2'-fluoro
  misc_feature (20)..(21): internucleotide phosphorothioate linkage
acgugguucaugacuuucunn

SEQ ID NO: 2124 - RNA, 21 nt, Artificial Sequence
  Description of Artificial Sequence:  siNA sense region
  misc_feature (1)..(2): 2'-O-methyl
  misc_feature (3)..(3): 2'-deoxy-2'-fluoro
  misc_feature (4)..(4): 2'-O-methyl
  misc_feature (5)..(5): 2'-deoxy-2'-fluoro
  misc_feature (6)..(7): 2'-O-methyl
  misc_feature (8)..(10): 2'-deoxy-2'-fluoro
  misc_feature (11)..(11): 2'-O-methyl
  misc_feature (12)..(12): 2'-deoxy-2'-fluoro
  misc_feature (13)..(14): 2'-O-methyl
  misc_feature (15)..(19): 2'-deoxy-2'-fluoro
  misc_feature (20)..(21): internucleotide phosphorothioate linkage
aacgugguucaugacuuucnn

SEQ ID NO: 2125 - RNA, 21 nt, Artificial Sequence
  Description of Artificial Sequence:  siNA sense region
  misc_feature (1)..(2): 2'-deoxy-2'-fluoro
  misc_feature (3)..(4): 2'-O-methyl
  misc_feature (5)..(5): 2'-deoxy-2'-fluoro
  misc_feature (6)..(6): 2'-O-methyl
  misc_feature (7)..(7): 2'-deoxy-2'-fluoro
  misc_feature (8)..(9): 2'-O-methyl
  misc_feature (10)..(12): 2'-deoxy-2'-fluoro
  misc_feature (13)..(13): 2'-O-methyl
  misc_feature (14)..(14): 2'-deoxy-2'-fluoro
  misc_feature (15)..(16): 2'-O-methyl
  misc_feature (17)..(19): 2'-deoxy-2'-fluoro
  misc_feature (20)..(21): internucleotide phosphorothioate linkage
uuaacgugguucaugacuunn

SEQ ID NO: 2126 - RNA, 21 nt, Artificial Sequence
  Description of Artificial Sequence:  siNA sense region
  misc_feature (1)..(2): 2'-deoxy-2'-fluoro
  misc_feature (3)..(3): 2'-O-methyl
  misc_feature (4)..(5): 2'-deoxy-2'-fluoro
  misc_feature (6)..(7): 2'-O-methyl
  misc_feature (8)..(8): 2'-deoxy-2'-fluoro
  misc_feature (9)..(9): 2'-O-methyl
  misc_feature (10)..(10): 2'-deoxy-2'-fluoro
  misc_feature (11)..(12): 2'-O-methyl
  misc_feature (13)..(15): 2'-deoxy-2'-fluoro
  misc_feature (16)..(16): 2'-O-methyl
  misc_feature (17)..(17): 2'-deoxy-2'-fluoro
  misc_feature (18)..(19): 2'-O-methyl
  misc_feature (20)..(21): internucleotide phosphorothioate linkage
cuguuaacgugguucaugann

SEQ ID NO: 2127 - RNA, 21 nt, Artificial Sequence
  Description of Artificial Sequence:  siNA sense region
  misc_feature (1)..(1): 2'-O-methyl
  misc_feature (2)..(2): 2'-deoxy-2'-fluoro
  misc_feature (3)..(3): 2'-O-methyl
  misc_feature (4)..(4): 2'-deoxy-2'-fluoro
  misc_feature (5)..(7): 2'-O-methyl
  misc_feature (8)..(9): 2'-deoxy-2'-fluoro
  misc_feature (10)..(11): 2'-O-methyl
  misc_feature (12)..(12): 2'-deoxy-2'-fluoro
  misc_feature (13)..(13): 2'-O-methyl
  misc_feature (14)..(16): 2'-deoxy-2'-fluoro
  misc_feature (17)..(17): 2'-O-methyl
  misc_feature (18)..(19): 2'-deoxy-2'-fluoro
  misc_feature (20)..(21): internucleotide phosphorothioate linkage
gcaugaguuggcacccacunn

SEQ ID NO: 2128 - RNA, 21 nt, Artificial Sequence
  Description of Artificial Sequence:  siNA sense region
  misc_feature (1)..(1): 2'-O-methyl
  misc_feature (2)..(2): 2'-deoxy-2'-fluoro
  misc_feature (3)..(3): 2'-O-methyl
  misc_feature (4)..(5): 2'-deoxy-2'-fluoro
  misc_feature (6)..(7): 2'-O-methyl
  misc_feature (8)..(8): 2'-deoxy-2'-fluoro
  misc_feature (9)..(9): 2'-O-methyl
  misc_feature (10)..(10): 2'-deoxy-2'-fluoro
  misc_feature (11)..(13): 2'-O-methyl
  misc_feature (14)..(15): 2'-deoxy-2'-fluoro
  misc_feature (16)..(17): 2'-O-methyl
  misc_feature (18)..(18): 2'-deoxy-2'-fluoro
  misc_feature (19)..(19): 2'-O-methyl
  misc_feature (20)..(21): internucleotide phosphorothioate linkage
gcguuagcaugaguuggcann

SEQ ID NO: 2129 - RNA, 21 nt, Artificial Sequence
  Description of Artificial Sequence:  siNA sense region
  misc_feature (1)..(1): 2'-deoxy-2'-fluoro
  misc_feature (2)..(2): 2'-O-methyl
  misc_feature (3)..(3): 2'-deoxy-2'-fluoro
  misc_feature (4)..(4): 2'-O-methyl
  misc_feature (5)..(6): 2'-deoxy-2'-fluoro
  misc_feature (7)..(8): 2'-O-methyl
  misc_feature (9)..(9): 2'-deoxy-2'-fluoro
  misc_feature (10)..(10): 2'-O-methyl
  misc_feature (11)..(11): 2'-deoxy-2'-fluoro
  misc_feature (12)..(14): 2'-O-methyl
  misc_feature (15)..(16): 2'-deoxy-2'-fluoro
  misc_feature (17)..(18): 2'-O-methyl
  misc_feature (19)..(19): 2'-deoxy-2'-fluoro
  misc_feature (20)..(21): internucleotide phosphorothioate linkage
ugcguuagcaugaguuggcnn

SEQ ID NO: 2130 - RNA, 21 nt, Artificial Sequence
  Description of Artificial Sequence:  siNA sense region
  misc_feature (1)..(1): 2'-O-methyl
  misc_feature (2)..(3): 2'-deoxy-2'-fluoro
  misc_feature (4)..(4): 2'-O-methyl
  misc_feature (5)..(5): 2'-deoxy-2'-fluoro
  misc_feature (6)..(6): 2'-O-methyl
  misc_feature (7)..(8): 2'-deoxy-2'-fluoro
  misc_feature (9)..(10): 2'-O-methyl
  misc_feature (11)..(11): 2'-deoxy-2'-fluoro
  misc_feature (12)..(12): 2'-O-methyl
  misc_feature (13)..(13): 2'-deoxy-2'-fluoro
  misc_feature (14)..(16): 2'-O-methyl
  misc_feature (17)..(18): 2'-deoxy-2'-fluoro
  misc_feature (19)..(19): 2'-O-methyl
  misc_feature (20)..(21): internucleotide phosphorothioate linkage
gcugcguuagcaugaguugnn

SEQ ID NO: 2131 - RNA, 21 nt, Artificial Sequence
  Description of Artificial Sequence:  siNA sense region
  misc_feature (1)..(1): 2'-deoxy-2'-fluoro
  misc_feature (2)..(2): 2'-O-methyl
  misc_feature (3)..(4): 2'-deoxy-2'-fluoro
  misc_feature (5)..(5): 2'-O-methyl
  misc_feature (6)..(6): 2'-deoxy-2'-fluoro
  misc_feature (7)..(7): 2'-O-methyl
  misc_feature (8)..(9): 2'-deoxy-2'-fluoro
  misc_feature (10)..(11): 2'-O-methyl
  misc_feature (12)..(12): 2'-deoxy-2'-fluoro
  misc_feature (13)..(13): 2'-O-methyl
  misc_feature (14)..(14): 2'-deoxy-2'-fluoro
  misc_feature (15)..(17): 2'-O-methyl
  misc_feature (18)..(19): 2'-deoxy-2'-fluoro
  misc_feature (20)..(21): internucleotide phosphorothioate linkage
ugcugcguuagcaugaguunn

SEQ ID NO: 2132 - RNA, 21 nt, Artificial Sequence
  Description of Artificial Sequence:  siNA sense region
  misc_feature (1)..(2): 2'-deoxy-2'-fluoro
  misc_feature (3)..(3): 2'-O-methyl
  misc_feature (4)..(5): 2'-deoxy-2'-fluoro
  misc_feature (6)..(6): 2'-O-methyl
  misc_feature (7)..(7): 2'-deoxy-2'-fluoro
  misc_feature (8)..(8): 2'-O-methyl
  misc_feature (9)..(10): 2'-deoxy-2'-fluoro
  misc_feature (11)..(12): 2'-O-methyl
  misc_feature (13)..(13): 2'-deoxy-2'-fluoro
  misc_feature (14)..(14): 2'-O-methyl
  misc_feature (15)..(15): 2'-deoxy-2'-fluoro
  misc_feature (16)..(18): 2'-O-methyl
  misc_feature (19)..(19): 2'-deoxy-2'-fluoro
  misc_feature (20)..(21): internucleotide phosphorothioate linkage
cugcugcguuagcaugagunn

SEQ ID NO: 2133 - RNA, 21 nt, Artificial Sequence
  Description of Artificial Sequence:  siNA sense region
  misc_feature (1)..(1): 2'-O-methyl
  misc_feature (2)..(2): 2'-deoxy-2'-fluoro
  misc_feature (3)..(3): 2'-O-methyl
  misc_feature (4)..(4): 2'-deoxy-2'-fluoro
  misc_feature (5)..(6): 2'-O-methyl
  misc_feature (7)..(11): 2'-deoxy-2'-fluoro
  misc_feature (12)..(13): 2'-O-methyl
  misc_feature (14)..(15): 2'-deoxy-2'-fluoro
  misc_feature (16)..(17): 2'-O-methyl
  misc_feature (18)..(18): 2'-deoxy-2'-fluoro
  misc_feature (19)..(19): 2'-O-methyl
  misc_feature (20)..(21): internucleotide phosphorothioate linkage
augcaguucuuggucaaugnn

SEQ ID NO: 2134 - RNA, 21 nt, Artificial Sequence
  Description of Artificial Sequence:  siNA sense region
  misc_feature (1)..(1): 2'-deoxy-2'-fluoro
  misc_feature (2)..(2): 2'-O-methyl
  misc_feature (3)..(3): 2'-deoxy-2'-fluoro
  misc_feature (4)..(4): 2'-O-methyl
  misc_feature (5)..(5): 2'-deoxy-2'-fluoro
  misc_feature (6)..(7): 2'-O-methyl
  misc_feature (8)..(12): 2'-deoxy-2'-fluoro
  misc_feature (13)..(14): 2'-O-methyl
  misc_feature (15)..(16): 2'-deoxy-2'-fluoro
  misc_feature (17)..(18): 2'-O-methyl
  misc_feature (19)..(19): 2'-deoxy-2'-fluoro
  misc_feature (20)..(21): internucleotide phosphorothioate linkage
caugcaguucuuggucaaunn

SEQ ID NO: 2135 - RNA, 21 nt, Artificial Sequence
  Description of Artificial Sequence:  siNA sense region
  misc_feature (1)..(2): 2'-deoxy-2'-fluoro
  misc_feature (3)..(3): 2'-O-methyl
  misc_feature (4)..(4): 2'-deoxy-2'-fluoro
  misc_feature (5)..(5): 2'-O-methyl
  misc_feature (6)..(6): 2'-deoxy-2'-fluoro
  misc_feature (7)..(8): 2'-O-methyl
  misc_feature (9)..(13): 2'-deoxy-2'-fluoro
  misc_feature (14)..(15): 2'-O-methyl
  misc_feature (16)..(17): 2'-deoxy-2'-fluoro
  misc_feature (18)..(19): 2'-O-methyl
  misc_feature (20)..(21): internucleotide phosphorothioate linkage
ccaugcaguucuuggucaann

SEQ ID NO: 2136 - RNA, 21 nt, Artificial Sequence
  Description of Artificial Sequence:  siNA sense region
  misc_feature (1)..(3): 2'-deoxy-2'-fluoro
  misc_feature (4)..(4): 2'-O-methyl
  misc_feature (5)..(5): 2'-deoxy-2'-fluoro
  misc_feature (6)..(6): 2'-O-methyl
  misc_feature (7)..(7): 2'-deoxy-2'-fluoro
  misc_feature (8)..(9): 2'-O-methyl
  misc_feature (10)..(14): 2'-deoxy-2'-fluoro
  misc_feature (15)..(16): 2'-O-methyl
  misc_feature (17)..(18): 2'-deoxy-2'-fluoro
  misc_feature (19)..(19): 2'-O-methyl
  misc_feature (20)..(21): internucleotide phosphorothioate linkage
uccaugcaguucuuggucann

SEQ ID NO: 2137 - RNA, 21 nt, Artificial Sequence
  Description of Artificial Sequence:  siNA sense region
  misc_feature (1)..(2): 2'-O-methyl
  misc_feature (3)..(5): 2'-deoxy-2'-fluoro
  misc_feature (6)..(6): 2'-O-methyl
  misc_feature (7)..(7): 2'-deoxy-2'-fluoro
  misc_feature (8)..(8): 2'-O-methyl
  misc_feature (9)..(9): 2'-deoxy-2'-fluoro
  misc_feature (10)..(11): 2'-O-methyl
  misc_feature (12)..(16): 2'-deoxy-2'-fluoro
  misc_feature (17)..(18): 2'-O-methyl
  misc_feature (19)..(19): 2'-deoxy-2'-fluoro
  misc_feature (20)..(21): internucleotide phosphorothioate linkage
gguccaugcaguucuuggunn

SEQ ID NO: 2138 - RNA, 21 nt, Artificial Sequence
  Description of Artificial Sequence:  siNA sense region
  misc_feature (1)..(1): 2'-deoxy-2'-fluoro
  misc_feature (2)..(4): 2'-O-methyl
  misc_feature (5)..(7): 2'-deoxy-2'-fluoro
  misc_feature (8)..(8): 2'-O-methyl
  misc_feature (9)..(9): 2'-deoxy-2'-fluoro
  misc_feature (10)..(10): 2'-O-methyl
  misc_feature (11)..(11): 2'-deoxy-2'-fluoro
  misc_feature (12)..(13): 2'-O-methyl
  misc_feature (14)..(18): 2'-deoxy-2'-fluoro
  misc_feature (19)..(19): 2'-O-methyl
  misc_feature (20)..(21): internucleotide phosphorothioate linkage
uagguccaugcaguucuugnn

SEQ ID NO: 2139 - RNA, 21 nt, Artificial Sequence
  Description of Artificial Sequence:  siNA sense region
  misc_feature (1)..(1): 2'-O-methyl
  misc_feature (2)..(3): 2'-deoxy-2'-fluoro
  misc_feature (4)..(6): 2'-O-methyl
  misc_feature (7)..(9): 2'-deoxy-2'-fluoro
  misc_feature (10)..(10): 2'-O-methyl
  misc_feature (11)..(11): 2'-deoxy-2'-fluoro
  misc_feature (12)..(12): 2'-O-methyl
  misc_feature (13)..(13): 2'-deoxy-2'-fluoro
  misc_feature (14)..(15): 2'-O-methyl
  misc_feature (16)..(19): 2'-deoxy-2'-fluoro
  misc_feature (20)..(21): internucleotide phosphorothioate linkage
guuagguccaugcaguucunn

SEQ ID NO: 2140 - RNA, 21 nt, Artificial Sequence
  Description of Artificial Sequence:  siNA sense region
  misc_feature (1)..(1): 2'-O-methyl
  misc_feature (2)..(2): 2'-deoxy-2'-fluoro
  misc_feature (3)..(3): 2'-O-methyl
  misc_feature (4)..(5): 2'-deoxy-2'-fluoro
  misc_feature (6)..(8): 2'-O-methyl
  misc_feature (8)..(11): 2'-deoxy-2'-fluoro
  misc_feature (12)..(12): 2'-O-methyl
  misc_feature (13)..(13): 2'-deoxy-2'-fluoro
  misc_feature (14)..(14): 2'-O-methyl
  misc_feature (15)..(15): 2'-deoxy-2'-fluoro
  misc_feature (16)..(17): 2'-O-methyl
  misc_feature (18)..(19): 2'-deoxy-2'-fluoro
  misc_feature (20)..(21): internucleotide phosphorothioate linkage
auguuagguccaugcaguunn

SEQ ID NO: 2141 - RNA, 21 nt, Artificial Sequence
  Description of Artificial Sequence:  siNA sense region
  misc_feature (1)..(2): 2'-O-methyl
  misc_feature (3)..(3): 2'-deoxy-2'-fluoro
  misc_feature (4)..(4): 2'-O-methyl
  misc_feature (5)..(6): 2'-deoxy-2'-fluoro
  misc_feature (7)..(9): 2'-O-methyl
  misc_feature (10)..(12): 2'-deoxy-2'-fluoro
  misc_feature (13)..(13): 2'-O-methyl
  misc_feature (14)..(14): 2'-deoxy-2'-fluoro
  misc_feature (15)..(15): 2'-O-methyl
  misc_feature (16)..(16): 2'-deoxy-2'-fluoro
  misc_feature (17)..(18): 2'-O-methyl
  misc_feature (19)..(19): 2'-deoxy-2'-fluoro
  misc_feature (20)..(21): internucleotide phosphorothioate linkage
aauguuagguccaugcagunn

SEQ ID NO: 2142 - RNA, 21 nt, Artificial Sequence
  Description of Artificial Sequence:  siNA sense region
  misc_feature (1)..(3): 2'-O-methyl
  misc_feature (4)..(4): 2'-deoxy-2'-fluoro
  misc_feature (5)..(5): 2'-O-methyl
  misc_feature (6)..(7): 2'-deoxy-2'-fluoro
  misc_feature (8)..(10): 2'-O-methyl
  misc_feature (11)..(13): 2'-deoxy-2'-fluoro
  misc_feature (14)..(14): 2'-O-methyl
  misc_feature (15)..(15): 2'-deoxy-2'-fluoro
  misc_feature (16)..(16): 2'-O-methyl
  misc_feature (17)..(17): 2'-deoxy-2'-fluoro
  misc_feature (18)..(19): 2'-O-methyl
  misc_feature (20)..(21): internucleotide phosphorothioate linkage
gaauguuagguccaugcagnn

SEQ ID NO: 2143 - RNA, 21 nt, Artificial Sequence
  Description of Artificial Sequence:  siNA sense region
  misc_feature (1)..(2): 2'-deoxy-2'-fluoro
  misc_feature (3)..(5): 2'-O-methyl
  misc_feature (6)..(6): 2'-deoxy-2'-fluoro
  misc_feature (7)..(7): 2'-O-methyl
  misc_feature (8)..(9): 2'-deoxy-2'-fluoro
  misc_feature (10)..(12): 2'-O-methyl
  misc_feature (13)..(15): 2'-deoxy-2'-fluoro
  misc_feature (16)..(16): 2'-O-methyl
  misc_feature (17)..(17): 2'-deoxy-2'-fluoro
  misc_feature (18)..(18): 2'-O-methyl
  misc_feature (19)..(19): 2'-deoxy-2'-fluoro
  misc_feature (20)..(21): internucleotide phosphorothioate linkage
ucgaauguuagguccaugcnn

SEQ ID NO: 2144 - RNA, 21 nt, Artificial Sequence
  Description of Artificial Sequence:  siNA sense region
  misc_feature (1)..(2): 2'-O-methyl
  misc_feature (3)..(4): 2'-deoxy-2'-fluoro
  misc_feature (5)..(7): 2'-O-methyl
  misc_feature (8)..(8): 2'-deoxy-2'-fluoro
  misc_feature (9)..(9): 2'-O-methyl
  misc_feature (10)..(11): 2'-deoxy-2'-fluoro
  misc_feature (12)..(14): 2'-O-methyl
  misc_feature (15)..(17): 2'-deoxy-2'-fluoro
  misc_feature (18)..(18): 2'-O-methyl
  misc_feature (19)..(19): 2'-deoxy-2'-fluoro
  misc_feature (20)..(21): internucleotide phosphorothioate linkage
gaucgaauguuagguccaunn

SEQ ID NO: 2145 - RNA, 21 nt, Artificial Sequence
  Description of Artificial Sequence:  siNA sense region
  misc_feature (1)..(1): 5'-3 attached terminal deoxyabasic moiety
  misc_feature (20)..(20): n is thymidine
  misc_feature (21)..(21): 3'-3 attached terminal deoxyabasic moiety
ugaccgcgacuuuucaaagnn

SEQ ID NO: 2146 - RNA, 21 nt, Artificial Sequence
  Description of Artificial Sequence:  siNA sense region
  misc_feature (1)..(1): 5'-3 attached terminal deoxyabasic moiety
  misc_feature (20)..(20): n is thymidine
  misc_feature (21)..(21): 3'-3 attached terminal deoxyabasic moiety
aaccucagcaacuucaaccnn

SEQ ID NO: 2147 - RNA, 21 nt, Artificial Sequence
  Description of Artificial Sequence:  siNA sense region
  misc_feature (1)..(1): 5'-3 attached terminal deoxyabasic moiety
  misc_feature (20)..(20): n is thymidine
  misc_feature (21)..(21): 3'-3 attached terminal deoxyabasic moiety
accucagcaacuucaacccnn

SEQ ID NO: 2148 - RNA, 21 nt, Artificial Sequence
  Description of Artificial Sequence:  siNA sense region
  misc_feature (1)..(1): 5'-3 attached terminal deoxyabasic moiety
  misc_feature (20)..(20): n is thymidine
  misc_feature (21)..(21): 3'-3 attached terminal deoxyabasic moiety
gaaaaagugaaaaccuugann

SEQ ID NO: 2149 - RNA, 21 nt, Artificial Sequence
  Description of Artificial Sequence:  siNA sense region
  misc_feature (1)..(1): 5'-3 attached terminal deoxyabasic moiety
  misc_feature (20)..(20): n is thymidine
  misc_feature (21)..(21): 3'-3 attached terminal deoxyabasic moiety
aaaaagugaaaaccuugaann

SEQ ID NO: 2150 - RNA, 21 nt, Artificial Sequence
  Description of Artificial Sequence:  siNA sense region
  misc_feature (1)..(1): 5'-3 attached terminal deoxyabasic moiety
  misc_feature (20)..(20): n is thymidine
  misc_feature (21)..(21): 3'-3 attached terminal deoxyabasic moiety
cagggaacagguggcacagnn

SEQ ID NO: 2151 - RNA, 21 nt, Artificial Sequence
  Description of Artificial Sequence:  siNA sense region
  misc_feature (1)..(1): 5'-3 attached terminal deoxyabasic moiety
  misc_feature (20)..(20): n is thymidine
  misc_feature (21)..(21): 3'-3 attached terminal deoxyabasic moiety
agaaagucaugaaccacgunn

SEQ ID NO: 2152 - RNA, 21 nt, Artificial Sequence
  Description of Artificial Sequence:  siNA sense region
  misc_feature (1)..(1): 5'-3 attached terminal deoxyabasic moiety
  misc_feature (20)..(20): n is thymidine
  misc_feature (21)..(21): 3'-3 attached terminal deoxyabasic moiety
gaaagucaugaaccacguunn

SEQ ID NO: 2153 - RNA, 21 nt, Artificial Sequence
  Description of Artificial Sequence:  siNA sense region
  misc_feature (1)..(1): 5'-3 attached terminal deoxyabasic moiety
  misc_feature (20)..(20): n is thymidine
  misc_feature (21)..(21): 3'-3 attached terminal deoxyabasic moiety
aagucaugaaccacguuaann

SEQ ID NO: 2154 - RNA, 21 nt, Artificial Sequence
  Description of Artificial Sequence:  siNA sense region
  misc_feature (1)..(1): 5'-3 attached terminal deoxyabasic moiety
  misc_feature (20)..(20): n is thymidine
  misc_feature (21)..(21): 3'-3 attached terminal deoxyabasic moiety
ucaugaaccacguuaacagnn

SEQ ID NO: 2155 - RNA, 21 nt, Artificial Sequence
  Description of Artificial Sequence:  siNA sense region
  misc_feature (1)..(1): 5'-3 attached terminal deoxyabasic moiety
  misc_feature (20)..(20): n is thymidine
  misc_feature (21)..(21): 3'-3 attached terminal deoxyabasic moiety
agugggugccaacucaugcnn

SEQ ID NO: 2156 - RNA, 21 nt, Artificial Sequence
  Description of Artificial Sequence:  siNA sense region
  misc_feature (1)..(1): 5'-3 attached terminal deoxyabasic moiety
  misc_feature (20)..(20): n is thymidine
  misc_feature (21)..(21): 3'-3 attached terminal deoxyabasic moiety
ugccaacucaugcuaacgcnn

SEQ ID NO: 2157 - RNA, 21 nt, Artificial Sequence
  Description of Artificial Sequence:  siNA sense region
  misc_feature (1)..(1): 5'-3 attached terminal deoxyabasic moiety
  misc_feature (20)..(20): n is thymidine
  misc_feature (21)..(21): 3'-3 attached terminal deoxyabasic moiety
gccaacucaugcuaacgcann

SEQ ID NO: 2158 - RNA, 21 nt, Artificial Sequence
  Description of Artificial Sequence:  siNA sense region
  misc_feature (1)..(1): 5'-3 attached terminal deoxyabasic moiety
  misc_feature (20)..(20): n is thymidine
  misc_feature (21)..(21): 3'-3 attached terminal deoxyabasic moiety
caacucaugcuaacgcagcnn

SEQ ID NO: 2159 - RNA, 21 nt, Artificial Sequence
  Description of Artificial Sequence:  siNA sense region
  misc_feature (1)..(1): 5'-3 attached terminal deoxyabasic moiety
  misc_feature (20)..(20): n is thymidine
  misc_feature (21)..(21): 3'-3 attached terminal deoxyabasic moiety
aacucaugcuaacgcagcann

SEQ ID NO: 2160 - RNA, 21 nt, Artificial Sequence
  Description of Artificial Sequence:  siNA sense region
  misc_feature (1)..(1): 5'-3 attached terminal deoxyabasic moiety
  misc_feature (20)..(20): n is thymidine
  misc_feature (21)..(21): 3'-3 attached terminal deoxyabasic moiety
acucaugcuaacgcagcagnn

SEQ ID NO: 2161 - RNA, 21 nt, Artificial Sequence
  Description of Artificial Sequence:  siNA sense region
  misc_feature (1)..(1): 5'-3 attached terminal deoxyabasic moiety
  misc_feature (20)..(20): n is thymidine
  misc_feature (21)..(21): 3'-3 attached terminal deoxyabasic moiety
cauugaccaagaacugcaunn

SEQ ID NO: 2162 - RNA, 21 nt, Artificial Sequence
  Description of Artificial Sequence:  siNA sense region
  misc_feature (1)..(1): 5'-3 attached terminal deoxyabasic moiety
  misc_feature (20)..(20): n is thymidine
  misc_feature (21)..(21): 3'-3 attached terminal deoxyabasic moiety
auugaccaagaacugcaugnn

SEQ ID NO: 2163 - RNA, 21 nt, Artificial Sequence
  Description of Artificial Sequence:  siNA sense region
  misc_feature (1)..(1): 5'-3 attached terminal deoxyabasic moiety
  misc_feature (20)..(20): n is thymidine
  misc_feature (21)..(21): 3'-3 attached terminal deoxyabasic moiety
uugaccaagaacugcauggnn

SEQ ID NO: 2164 - RNA, 21 nt, Artificial Sequence
  Description of Artificial Sequence:  siNA sense region
  misc_feature (1)..(1): 5'-3 attached terminal deoxyabasic moiety
  misc_feature (20)..(20): n is thymidine
  misc_feature (21)..(21): 3'-3 attached terminal deoxyabasic moiety
ugaccaagaacugcauggann

SEQ ID NO: 2165 - RNA, 21 nt, Artificial Sequence
  Description of Artificial Sequence:  siNA sense region
  misc_feature (1)..(1): 5'-3 attached terminal deoxyabasic moiety
  misc_feature (20)..(20): n is thymidine
  misc_feature (21)..(21): 3'-3 attached terminal deoxyabasic moiety
accaagaacugcauggaccnn

SEQ ID NO: 2166 - RNA, 21 nt, Artificial Sequence
  Description of Artificial Sequence:  siNA sense region
  misc_feature (1)..(1): 5'-3 attached terminal deoxyabasic moiety
  misc_feature (20)..(20): n is thymidine
  misc_feature (21)..(21): 3'-3 attached terminal deoxyabasic moiety
caagaacugcauggaccuann

SEQ ID NO: 2167 - RNA, 21 nt, Artificial Sequence
  Description of Artificial Sequence:  siNA sense region
  misc_feature (1)..(1): 5'-3 attached terminal deoxyabasic moiety
  misc_feature (20)..(20): n is thymidine
  misc_feature (21)..(21): 3'-3 attached terminal deoxyabasic moiety
agaacugcauggaccuaacnn

SEQ ID NO: 2168 - RNA, 21 nt, Artificial Sequence
  Description of Artificial Sequence:  siNA sense region
  misc_feature (1)..(1): 5'-3 attached terminal deoxyabasic moiety
  misc_feature (20)..(20): n is thymidine
  misc_feature (21)..(21): 3'-3 attached terminal deoxyabasic moiety
aacugcauggaccuaacaunn

SEQ ID NO: 2169 - RNA, 21 nt, Artificial Sequence
  Description of Artificial Sequence:  siNA sense region
  misc_feature (1)..(1): 5'-3 attached terminal deoxyabasic moiety
  misc_feature (20)..(20): n is thymidine
  misc_feature (21)..(21): 3'-3 attached terminal deoxyabasic moiety
acugcauggaccuaacauunn

SEQ ID NO: 2170 - RNA, 21 nt, Artificial Sequence
  Description of Artificial Sequence:  siNA sense region
  misc_feature (1)..(1): 5'-3 attached terminal deoxyabasic moiety
  misc_feature (20)..(20): n is thymidine
  misc_feature (21)..(21): 3'-3 attached terminal deoxyabasic moiety
cugcauggaccuaacauucnn

SEQ ID NO: 2171 - RNA, 21 nt, Artificial Sequence
  Description of Artificial Sequence:  siNA sense region
  misc_feature (1)..(1): 5'-3 attached terminal deoxyabasic moiety
  misc_feature (20)..(20): n is thymidine
  misc_feature (21)..(21): 3'-3 attached terminal deoxyabasic moiety
gcauggaccuaacauucgann

SEQ ID NO: 2172 - RNA, 21 nt, Artificial Sequence
  Description of Artificial Sequence:  siNA sense region
  misc_feature (1)..(1): 5'-3 attached terminal deoxyabasic moiety
  misc_feature (20)..(20): n is thymidine
  misc_feature (21)..(21): 3'-3 attached terminal deoxyabasic moiety
auggaccuaacauucgaucnn

SEQ ID NO: 2173 - RNA, 21 nt, Artificial Sequence
  Description of Artificial Sequence:  siNA sense region
  misc_feature (20)..(21): internucleotide phosphorothioate linkage
cuuugaaaagucgcggucann

SEQ ID NO: 2174 - RNA, 21 nt, Artificial Sequence
  Description of Artificial Sequence:  siNA sense region
  misc_feature (20)..(21): internucleotide phosphorothioate linkage
gguugaaguugcugagguunn

SEQ ID NO: 2175 - RNA, 21 nt, Artificial Sequence
  Description of Artificial Sequence:  siNA sense region
  misc_feature (20)..(21): internucleotide phosphorothioate linkage
ggguugaaguugcugaggunn

SEQ ID NO: 2176 - RNA, 21 nt, Artificial Sequence
  Description of Artificial Sequence:  siNA sense region
  misc_feature (20)..(21): internucleotide phosphorothioate linkage
ucaagguuuucacuuuuucnn

SEQ ID NO: 2177 - RNA, 21 nt, Artificial Sequence
  Description of Artificial Sequence:  siNA sense region
  misc_feature (20)..(21): internucleotide phosphorothioate linkage
uucaagguuuucacuuuuunn

SEQ ID NO: 2178 - RNA, 21 nt, Artificial Sequence
  Description of Artificial Sequence:  siNA sense region
  misc_feature (20)..(21): internucleotide phosphorothioate linkage
cugugccaccuguucccugnn

SEQ ID NO: 2179 - RNA, 21 nt, Artificial Sequence
  Description of Artificial Sequence:  siNA sense region
  misc_feature (20)..(21): internucleotide phosphorothioate linkage
acgugguucaugacuuucunn

SEQ ID NO: 2180 - RNA, 21 nt, Artificial Sequence
  Description of Artificial Sequence:  siNA sense region
  misc_feature (20)..(21): internucleotide phosphorothioate linkage
aacgugguucaugacuuucnn

SEQ ID NO: 2181 - RNA, 21 nt, Artificial Sequence
  Description of Artificial Sequence:  siNA sense region
  misc_feature (20)..(21): internucleotide phosphorothioate linkage
uuaacgugguucaugacuunn

SEQ ID NO: 2182 - RNA, 21 nt, Artificial Sequence
  Description of Artificial Sequence:  siNA sense region
  misc_feature (20)..(21): internucleotide phosphorothioate linkage
cuguuaacgugguucaugann

SEQ ID NO: 2183 - RNA, 21 nt, Artificial Sequence
  Description of Artificial Sequence:  siNA sense region
  misc_feature (20)..(21): internucleotide phosphorothioate linkage
gcaugaguuggcacccacunn

SEQ ID NO: 2184 - RNA, 21 nt, Artificial Sequence
  Description of Artificial Sequence:  siNA sense region
  misc_feature (20)..(21): internucleotide phosphorothioate linkage
gcguuagcaugaguuggcann

SEQ ID NO: 2185 - RNA, 21 nt, Artificial Sequence
  Description of Artificial Sequence:  siNA sense region
  misc_feature (20)..(21): internucleotide phosphorothioate linkage
ugcguuagcaugaguuggcnn

SEQ ID NO: 2186 - RNA, 21 nt, Artificial Sequence
  Description of Artificial Sequence:  siNA sense region
  misc_feature (20)..(21): internucleotide phosphorothioate linkage
gcugcguuagcaugaguugnn

SEQ ID NO: 2187 - RNA, 21 nt, Artificial Sequence
  Description of Artificial Sequence:  siNA sense region
  misc_feature (20)..(21): internucleotide phosphorothioate linkage
ugcugcguuagcaugaguunn

SEQ ID NO: 2188 - RNA, 21 nt, Artificial Sequence
  Description of Artificial Sequence:  siNA sense region
  misc_feature (20)..(21): internucleotide phosphorothioate linkage
cugcugcguuagcaugagunn

SEQ ID NO: 2189 - RNA, 21 nt, Artificial Sequence
  Description of Artificial Sequence:  siNA sense region
  misc_feature (20)..(21): internucleotide phosphorothioate linkage
augcaguucuuggucaaugnn

SEQ ID NO: 2190 - RNA, 21 nt, Artificial Sequence
  Description of Artificial Sequence:  siNA sense region
  misc_feature (20)..(21): internucleotide phosphorothioate linkage
caugcaguucuuggucaaunn

SEQ ID NO: 2191 - RNA, 21 nt, Artificial Sequence
  Description of Artificial Sequence:  siNA sense region
  misc_feature (20)..(21): internucleotide phosphorothioate linkage
ccaugcaguucuuggucaann

SEQ ID NO: 2192 - RNA, 21 nt, Artificial Sequence
  Description of Artificial Sequence:  siNA sense region
  misc_feature (20)..(21): internucleotide phosphorothioate linkage
uccaugcaguucuuggucann

SEQ ID NO: 2193 - RNA, 21 nt, Artificial Sequence
  Description of Artificial Sequence:  siNA sense region
  misc_feature (20)..(21)
  misc_feature (20)..(21): n is thymidine
gguccaugcaguucuuggunn

SEQ ID NO: 2194 - RNA, 21 nt, Artificial Sequence
  Description of Artificial Sequence:  siNA sense region
  misc_feature (20)..(21): internucleotide phosphorothioate linkage
uagguccaugcaguucuugnn

SEQ ID NO: 2195 - RNA, 21 nt, Artificial Sequence
  Description of Artificial Sequence:  siNA sense region
  misc_feature (20)..(21): internucleotide phosphorothioate linkage
guuagguccaugcaguucunn

SEQ ID NO: 2196 - RNA, 21 nt, Artificial Sequence
  Description of Artificial Sequence:  siNA sense region
  misc_feature (20)..(21): internucleotide phosphorothioate linkage
auguuagguccaugcaguunn

SEQ ID NO: 2197 - RNA, 21 nt, Artificial Sequence
  Description of Artificial Sequence:  siNA sense region
  misc_feature (20)..(21): internucleotide phosphorothioate linkage
aauguuagguccaugcagunn

SEQ ID NO: 2198 - RNA, 21 nt, Artificial Sequence
  Description of Artificial Sequence:  siNA sense region
  misc_feature (20)..(21): internucleotide phosphorothioate linkage
gaauguuagguccaugcagnn

SEQ ID NO: 2199 - RNA, 21 nt, Artificial Sequence
  Description of Artificial Sequence:  siNA sense region
  misc_feature (20)..(21): internucleotide phosphorothioate linkage
ucgaauguuagguccaugcnn

SEQ ID NO: 2200 - RNA, 21 nt, Artificial Sequence
  Description of Artificial Sequence:  siNA sense region
  misc_feature (20)..(21): internucleotide phosphorothioate linkage
gaucgaauguuagguccaunn

SEQ ID NO: 2201 - RNA, 21 nt, Artificial Sequence
  Description of Artificial Sequence:  siNA sense region
  misc_feature (1)..(4): 2'-deoxy-2'-fluoro
  misc_feature (5)..(10): 2'-O-methyl
  misc_feature (11)..(12): 2'-deoxy-2'-fluoro
  misc_feature (13)..(13): 2'-O-methyl
  misc_feature (14)..(14): 2'-deoxy-2'-fluoro
  misc_feature (15)..(16): 2'-O-methyl
  misc_feature (17)..(18): 2'-deoxy-2'-fluoro
  misc_feature (19)..(19): 2'-O-methyl
  misc_feature (20)..(20): n is thymidine
  misc_feature (21)..(21): 3'-3 attached terminal deoxyabasic moiety
cuuugaaaagucgcggucann

SEQ ID NO: 2202 - RNA, 21 nt, Artificial Sequence
  Description of Artificial Sequence:  siNA sense region
  misc_feature (1)..(2): 2'-O-methyl
  misc_feature (3)..(4): 2'-deoxy-2'-fluoro
  misc_feature (5)..(8): 2'-O-methyl
  misc_feature (9)..(10): 2'-deoxy-2'-fluoro
  misc_feature (11)..(11): 2'-O-methyl
  misc_feature (12)..(13): 2'-deoxy-2'-fluoro
  misc_feature (14)..(17): 2'-O-methyl
  misc_feature (18)..(19): 2'-deoxy-2'-fluoro
  misc_feature (20)..(20): n is thymidine
  misc_feature (21)..(21): 3'-3 attached terminal deoxyabasic moiety
gguugaaguugcugagguunn

SEQ ID NO: 2203 - RNA, 21 nt, Artificial Sequence
  Description of Artificial Sequence:  siNA sense region
  misc_feature (1)..(3): 2'-O-methyl
  misc_feature (4)..(5): 2'-deoxy-2'-fluoro
  misc_feature (6)..(9): 2'-O-methyl
  misc_feature (10)..(11): 2'-deoxy-2'-fluoro
  misc_feature (12)..(12): 2'-O-methyl
  misc_feature (13)..(14): 2'-deoxy-2'-fluoro
  misc_feature (15)..(18): 2'-O-methyl
  misc_feature (19)..(19): 2'-deoxy-2'-fluoro
  misc_feature (20)..(20): n is thymidine
  misc_feature (21)..(21): 3'-3 attached terminal deoxyabasic moiety
ggguugaaguugcugaggunn

SEQ ID NO: 2204 - RNA, 21 nt, Artificial Sequence
  Description of Artificial Sequence:  siNA sense region
  misc_feature (1)..(2): 2'-deoxy-2'-fluoro
  misc_feature (3)..(6): 2'-O-methyl
  misc_feature (7)..(11): 2'-deoxy-2'-fluoro
  misc_feature (12)..(12): 2'-O-methyl
  misc_feature (13)..(19): 2'-deoxy-2'-fluoro
  misc_feature (20)..(20): n is thymidine
  misc_feature (21)..(21): 3'-3 attached terminal deoxyabasic moiety
ucaagguuuucacuuuuucnn

SEQ ID NO: 2205 - RNA, 21 nt, Artificial Sequence
  Description of Artificial Sequence:  siNA sense region
  misc_feature (1)..(3): 2'-deoxy-2'-fluoro
  misc_feature (4)..(7): 2'-O-methyl
  misc_feature (8)..(12): 2'-deoxy-2'-fluoro
  misc_feature (13)..(13): 2'-O-methyl
  misc_feature (14)..(19): 2'-deoxy-2'-fluoro
  misc_feature (20)..(20): n is thymidine
  misc_feature (21)..(21): 3'-3 attached terminal deoxyabasic moiety
uucaagguuuucacuuuuunn

SEQ ID NO: 2206 - RNA, 21 nt, Artificial Sequence
  Description of Artificial Sequence:  siNA sense region
  misc_feature (1)..(2): 2'-deoxy-2'-fluoro
  misc_feature (3)..(3): 2'-O-methyl
  misc_feature (4)..(4): 2'-deoxy-2'-fluoro
  misc_feature (5)..(5): 2'-O-methyl
  misc_feature (6)..(7): 2'-deoxy-2'-fluoro
  misc_feature (8)..(11): 2'-deoxy-2'-fluoro
  misc_feature (8)..(8): 2'-O-methyl
  misc_feature (12)..(12): 2'-O-methyl
  misc_feature (13)..(18): 2'-deoxy-2'-fluoro
  misc_feature (19)..(19): 2'-O-methyl
  misc_feature (20)..(20): n is thymidine
  misc_feature (21)..(21): 3'-3 attached terminal deoxyabasic moiety
cugugccaccuguucccugnn

SEQ ID NO: 2207 - RNA, 21 nt, Artificial Sequence
  Description of Artificial Sequence:  siNA sense region
  misc_feature (1)..(1): 2'-O-methyl
  misc_feature (2)..(2): 2'-deoxy-2'-fluoro
  misc_feature (3)..(3): 2'-O-methyl
  misc_feature (4)..(4): 2'-deoxy-2'-fluoro
  misc_feature (5)..(6): 2'-O-methyl
  misc_feature (7)..(9): 2'-deoxy-2'-fluoro
  misc_feature (10)..(10): 2'-O-methyl
  misc_feature (11)..(11): 2'-deoxy-2'-fluoro
  misc_feature (12)..(13): 2'-O-methyl
  misc_feature (14)..(19): 2'-deoxy-2'-fluoro
  misc_feature (20)..(20): n is thymidine
  misc_feature (21)..(21): 3'-3 attached terminal deoxyabasic moiety
acgugguucaugacuuucunn

SEQ ID NO: 2208 - RNA, 21 nt, Artificial Sequence
  Description of Artificial Sequence:  siNA sense region
  misc_feature (1)..(2): 2'-O-methyl
  misc_feature (3)..(3): 2'-deoxy-2'-fluoro
  misc_feature (4)..(4): 2'-O-methyl
  misc_feature (5)..(5): 2'-deoxy-2'-fluoro
  misc_feature (6)..(7): 2'-O-methyl
  misc_feature (8)..(10): 2'-deoxy-2'-fluoro
  misc_feature (11)..(11): 2'-O-methyl
  misc_feature (12)..(12): 2'-deoxy-2'-fluoro
  misc_feature (13)..(14): 2'-O-methyl
  misc_feature (15)..(19): 2'-deoxy-2'-fluoro
  misc_feature (20)..(20): n is thymidine
  misc_feature (21)..(21): 3'-3 attached terminal deoxyabasic moiety
aacgugguucaugacuuucnn

SEQ ID NO: 2209 - RNA, 21 nt, Artificial Sequence
  Description of Artificial Sequence:  siNA sense region
  misc_feature (1)..(2): 2'-deoxy-2'-fluoro
  misc_feature (3)..(4): 2'-O-methyl
  misc_feature (5)..(5): 2'-deoxy-2'-fluoro
  misc_feature (6)..(6): 2'-O-methyl
  misc_feature (7)..(7): 2'-deoxy-2'-fluoro
  misc_feature (8)..(9): 2'-O-methyl
  misc_feature (10)..(12): 2'-deoxy-2'-fluoro
  misc_feature (13)..(13): 2'-O-methyl
  misc_feature (14)..(14): 2'-deoxy-2'-fluoro
  misc_feature (15)..(16): 2'-O-methyl
  misc_feature (17)..(19): 2'-deoxy-2'-fluoro
  misc_feature (20)..(20): n is thymidine
  misc_feature (21)..(21): 3'-3 attached terminal deoxyabasic moiety
uuaacgugguucaugacuunn

SEQ ID NO: 2210 - RNA, 21 nt, Artificial Sequence
  Description of Artificial Sequence:  siNA sense region
  misc_feature (1)..(2): 2'-deoxy-2'-fluoro
  misc_feature (3)..(3): 2'-O-methyl
  misc_feature (4)..(5): 2'-deoxy-2'-fluoro
  misc_feature (6)..(7): 2'-O-methyl
  misc_feature (8)..(8): 2'-deoxy-2'-fluoro
  misc_feature (9)..(9): 2'-O-methyl
  misc_feature (10)..(10): 2'-deoxy-2'-fluoro
  misc_feature (11)..(12): 2'-O-methyl
  misc_feature (13)..(15): 2'-deoxy-2'-fluoro
  misc_feature (16)..(16): 2'-O-methyl
  misc_feature (17)..(17): 2'-deoxy-2'-fluoro
  misc_feature (18)..(19): 2'-O-methyl
  misc_feature (20)..(20): n is thymidine
  misc_feature (21)..(21): 3'-3 attached terminal deoxyabasic moiety
cuguuaacgugguucaugann

SEQ ID NO: 2211 - RNA, 21 nt, Artificial Sequence
  Description of Artificial Sequence:  siNA sense region
  misc_feature (1)..(1): 2'-O-methyl
  misc_feature (2)..(2): 2'-deoxy-2'-fluoro
  misc_feature (3)..(3): 2'-O-methyl
  misc_feature (4)..(4): 2'-deoxy-2'-fluoro
  misc_feature (5)..(7): 2'-O-methyl
  misc_feature (8)..(9): 2'-deoxy-2'-fluoro
  misc_feature (10)..(11): 2'-O-methyl
  misc_feature (12)..(12): 2'-deoxy-2'-fluoro
  misc_feature (13)..(13): 2'-O-methyl
  misc_feature (14)..(16): 2'-deoxy-2'-fluoro
  misc_feature (17)..(17): 2'-O-methyl
  misc_feature (18)..(19): 2'-deoxy-2'-fluoro
  misc_feature (20)..(20): n is thymidine
  misc_feature (21)..(21): 3'-3 attached terminal deoxyabasic moiety
gcaugaguuggcacccacunn

SEQ ID NO: 2212 - RNA, 21 nt, Artificial Sequence
  Description of Artificial Sequence:  siNA sense region
  misc_feature (1)..(1): 2'-O-methyl
  misc_feature (2)..(2): 2'-deoxy-2'-fluoro
  misc_feature (3)..(3): 2'-O-methyl
  misc_feature (4)..(5): 2'-deoxy-2'-fluoro
  misc_feature (6)..(7): 2'-O-methyl
  misc_feature (8)..(8): 2'-deoxy-2'-fluoro
  misc_feature (9)..(9): 2'-O-methyl
  misc_feature (10)..(10): 2'-deoxy-2'-fluoro
  misc_feature (11)..(13): 2'-O-methyl
  misc_feature (14)..(15): 2'-deoxy-2'-fluoro
  misc_feature (16)..(17): 2'-O-methyl
  misc_feature (18)..(18): 2'-deoxy-2'-fluoro
  misc_feature (19)..(19): 2'-O-methyl
  misc_feature (20)..(20): n is thymidine
  misc_feature (21)..(21): 3'-3 attached terminal deoxyabasic moiety
gcguuagcaugaguuggcann

SEQ ID NO: 2213 - RNA, 21 nt, Artificial Sequence
  Description of Artificial Sequence:  siNA sense region
  misc_feature (1)..(1): 2'-deoxy-2'-fluoro
  misc_feature (2)..(2): 2'-O-methyl
  misc_feature (3)..(3): 2'-deoxy-2'-fluoro
  misc_feature (4)..(4): 2'-O-methyl
  misc_feature (5)..(6): 2'-deoxy-2'-fluoro
  misc_feature (7)..(8): 2'-O-methyl
  misc_feature (9)..(9): 2'-deoxy-2'-fluoro
  misc_feature (10)..(10): 2'-O-methyl
  misc_feature (11)..(11): 2'-deoxy-2'-fluoro
  misc_feature (12)..(14): 2'-O-methyl
  misc_feature (15)..(16): 2'-deoxy-2'-fluoro
  misc_feature (17)..(18): 2'-O-methyl
  misc_feature (19)..(19): 2'-deoxy-2'-fluoro
  misc_feature (20)..(20): n is thymidine
  misc_feature (21)..(21): 3'-3 attached terminal deoxyabasic moiety
ugcguuagcaugaguuggcnn

SEQ ID NO: 2214 - RNA, 21 nt, Artificial Sequence
  Description of Artificial Sequence:  siNA sense region
  misc_feature (1)..(1): 2'-O-methyl
  misc_feature (2)..(3): 2'-deoxy-2'-fluoro
  misc_feature (4)..(4): 2'-O-methyl
  misc_feature (5)..(5): 2'-deoxy-2'-fluoro
  misc_feature (6)..(6): 2'-O-methyl
  misc_feature (7)..(8): 2'-deoxy-2'-fluoro
  misc_feature (9)..(10): 2'-O-methyl
  misc_feature (11)..(11): 2'-deoxy-2'-fluoro
  misc_feature (12)..(12): 2'-O-methyl
  misc_feature (13)..(13): 2'-deoxy-2'-fluoro
  misc_feature (14)..(16): 2'-O-methyl
  misc_feature (17)..(18): 2'-deoxy-2'-fluoro
  misc_feature (19)..(19): 2'-O-methyl
  misc_feature (20)..(20): n is thymidine
  misc_feature (21)..(21): 3'-3 attached terminal deoxyabasic moiety
gcugcguuagcaugaguugnn

SEQ ID NO: 2215 - RNA, 21 nt, Artificial Sequence
  Description of Artificial Sequence:  siNA sense region
  misc_feature (1)..(1): 2'-deoxy-2'-fluoro
  misc_feature (2)..(2): 2'-O-methyl
  misc_feature (3)..(4): 2'-deoxy-2'-fluoro
  misc_feature (5)..(5): 2'-O-methyl
  misc_feature (6)..(6): 2'-deoxy-2'-fluoro
  misc_feature (7)..(7): 2'-O-methyl
  misc_feature (8)..(9): 2'-deoxy-2'-fluoro
  misc_feature (10)..(11): 2'-O-methyl
  misc_feature (12)..(12): 2'-deoxy-2'-fluoro
  misc_feature (13)..(13): 2'-O-methyl
  misc_feature (14)..(14): 2'-deoxy-2'-fluoro
  misc_feature (15)..(17): 2'-O-methyl
  misc_feature (18)..(19): 2'-deoxy-2'-fluoro
  misc_feature (20)..(20): n is thymidine
  misc_feature (21)..(21): 3'-3 attached terminal deoxyabasic moiety
ugcugcguuagcaugaguunn

SEQ ID NO: 2216 - RNA, 21 nt, Artificial Sequence
  Description of Artificial Sequence:  siNA sense region
  misc_feature (1)..(2): 2'-deoxy-2'-fluoro
  misc_feature (3)..(3): 2'-O-methyl
  misc_feature (4)..(5): 2'-deoxy-2'-fluoro
  misc_feature (6)..(6): 2'-O-methyl
  misc_feature (7)..(7): 2'-deoxy-2'-fluoro
  misc_feature (8)..(8): 2'-O-methyl
  misc_feature (9)..(10): 2'-deoxy-2'-fluoro
  misc_feature (11)..(12): 2'-O-methyl
  misc_feature (13)..(13): 2'-deoxy-2'-fluoro
  misc_feature (14)..(14): 2'-O-methyl
  misc_feature (15)..(15): 2'-deoxy-2'-fluoro
  misc_feature (16)..(18): 2'-O-methyl
  misc_feature (19)..(19): 2'-deoxy-2'-fluoro
  misc_feature (20)..(20): n is thymidine
  misc_feature (21)..(21): 3'-3 attached terminal deoxyabasic moiety
cugcugcguuagcaugagunn

SEQ ID NO: 2217 - RNA, 21 nt, Artificial Sequence
  Description of Artificial Sequence:  siNA sense region
  misc_feature (1)..(1): 2'-O-methyl
  misc_feature (2)..(2): 2'-deoxy-2'-fluoro
  misc_feature (3)..(3): 2'-O-methyl
  misc_feature (4)..(4): 2'-deoxy-2'-fluoro
  misc_feature (5)..(6): 2'-O-methyl
  misc_feature (7)..(11): 2'-deoxy-2'-fluoro
  misc_feature (12)..(13): 2'-O-methyl
  misc_feature (14)..(15): 2'-deoxy-2'-fluoro
  misc_feature (16)..(17): 2'-O-methyl
  misc_feature (18)..(18): 2'-deoxy-2'-fluoro
  misc_feature (19)..(19): 2'-O-methyl
  misc_feature (20)..(20): n is thymidine
  misc_feature (21)..(21): 3'-3 attached terminal deoxyabasic moiety
augcaguucuuggucaaugnn

SEQ ID NO: 2218 - RNA, 21 nt, Artificial Sequence
  Description of Artificial Sequence:  siNA sense region
  misc_feature (1)..(1): 2'-deoxy-2'-fluoro
  misc_feature (2)..(2): 2'-O-methyl
  misc_feature (3)..(3): 2'-deoxy-2'-fluoro
  misc_feature (4)..(4): 2'-O-methyl
  misc_feature (5)..(5): 2'-deoxy-2'-fluoro
  misc_feature (6)..(7): 2'-O-methyl
  misc_feature (8)..(12): 2'-deoxy-2'-fluoro
  misc_feature (13)..(14): 2'-O-methyl
  misc_feature (15)..(16): 2'-deoxy-2'-fluoro
  misc_feature (17)..(18): 2'-O-methyl
  misc_feature (19)..(19): 2'-deoxy-2'-fluoro
  misc_feature (20)..(20): n is thymidine
  misc_feature (21)..(21): 3'-3 attached terminal deoxyabasic moiety
caugcaguucuuggucaaunn

SEQ ID NO: 2219 - RNA, 21 nt, Artificial Sequence
  Description of Artificial Sequence:  siNA sense region
  misc_feature (1)..(2): 2'-deoxy-2'-fluoro
  misc_feature (3)..(3): 2'-O-methyl
  misc_feature (4)..(4): 2'-deoxy-2'-fluoro
  misc_feature (5)..(5): 2'-O-methyl
  misc_feature (6)..(6): 2'-deoxy-2'-fluoro
  misc_feature (7)..(8): 2'-O-methyl
  misc_feature (9)..(13): 2'-deoxy-2'-fluoro
  misc_feature (14)..(15): 2'-O-methyl
  misc_feature (16)..(17): 2'-deoxy-2'-fluoro
  misc_feature (18)..(19): 2'-O-methyl
  misc_feature (20)..(20): n is thymidine
  misc_feature (21)..(21): 3'-3 attached terminal deoxyabasic moiety
ccaugcaguucuuggucaann

SEQ ID NO: 2220 - RNA, 21 nt, Artificial Sequence
  Description of Artificial Sequence:  siNA sense region
  misc_feature (1)..(3): 2'-deoxy-2'-fluoro
  misc_feature (4)..(4): 2'-O-methyl
  misc_feature (5)..(5): 2'-deoxy-2'-fluoro
  misc_feature (6)..(6): 2'-O-methyl
  misc_feature (7)..(7): 2'-deoxy-2'-fluoro
  misc_feature (8)..(9): 2'-O-methyl
  misc_feature (10)..(14): 2'-deoxy-2'-fluoro
  misc_feature (15)..(16): 2'-O-methyl
  misc_feature (17)..(18): 2'-deoxy-2'-fluoro
  misc_feature (19)..(19): 2'-O-methyl
  misc_feature (20)..(20): n is thymidine
  misc_feature (21)..(21): 3'-3 attached terminal deoxyabasic moiety
uccaugcaguucuuggucann

SEQ ID NO: 2221 - RNA, 21 nt, Artificial Sequence
  Description of Artificial Sequence:  siNA sense region
  misc_feature (1)..(2): 2'-O-methyl
  misc_feature (3)..(5): 2'-deoxy-2'-fluoro
  misc_feature (6)..(6): 2'-O-methyl
  misc_feature (7)..(7): 2'-deoxy-2'-fluoro
  misc_feature (8)..(8): 2'-O-methyl
  misc_feature (9)..(9): 2'-deoxy-2'-fluoro
  misc_feature (10)..(11): 2'-O-methyl
  misc_feature (12)..(16): 2'-deoxy-2'-fluoro
  misc_feature (17)..(18): 2'-O-methyl
  misc_feature (19)..(19): 2'-deoxy-2'-fluoro
  misc_feature (20)..(20): n is thymidine
  misc_feature (21)..(21): 3'-3 attached terminal deoxyabasic moiety
gguccaugcaguucuuggunn

SEQ ID NO: 2222 - RNA, 21 nt, Artificial Sequence
  Description of Artificial Sequence:  siNA sense region
  misc_feature (1)..(1): 2'-deoxy-2'-fluoro
  misc_feature (2)..(4): 2'-O-methyl
  misc_feature (5)..(7): 2'-deoxy-2'-fluoro
  misc_feature (8)..(8): 2'-O-methyl
  misc_feature (9)..(9): 2'-deoxy-2'-fluoro
  misc_feature (10)..(10): 2'-O-methyl
  misc_feature (11)..(11): 2'-deoxy-2'-fluoro
  misc_feature (12)..(13): 2'-O-methyl
  misc_feature (14)..(18): 2'-deoxy-2'-fluoro
  misc_feature (19)..(19): 2'-O-methyl
  misc_feature (20)..(20): n is thymidine
  misc_feature (21)..(21): 3'-3 attached terminal deoxyabasic moiety
uagguccaugcaguucuugnn

SEQ ID NO: 2223 - RNA, 21 nt, Artificial Sequence
  Description of Artificial Sequence:  siNA sense region
  misc_feature (1)..(1): 2'-O-methyl
  misc_feature (2)..(3): 2'-deoxy-2'-fluoro
  misc_feature (4)..(6): 2'-O-methyl
  misc_feature (7)..(9): 2'-deoxy-2'-fluoro
  misc_feature (10)..(10): 2'-O-methyl
  misc_feature (11)..(11): 2'-deoxy-2'-fluoro
  misc_feature (12)..(12): 2'-O-methyl
  misc_feature (13)..(13): 2'-deoxy-2'-fluoro
  misc_feature (14)..(15): 2'-O-methyl
  misc_feature (16)..(19): 2'-deoxy-2'-fluoro
  misc_feature (20)..(20): n is thymidine
  misc_feature (21)..(21): 3'-3 attached terminal deoxyabasic moiety
guuagguccaugcaguucunn

SEQ ID NO: 2224 - RNA, 21 nt, Artificial Sequence
  Description of Artificial Sequence:  siNA sense region
  misc_feature (1)..(1): 2'-O-methyl
  misc_feature (2)..(2): 2'-deoxy-2'-fluoro
  misc_feature (3)..(3): 2'-O-methyl
  misc_feature (4)..(5): 2'-deoxy-2'-fluoro
  misc_feature (6)..(8): 2'-O-methyl
  misc_feature (9)..(11): 2'-deoxy-2'-fluoro
  misc_feature (12)..(12): 2'-O-methyl
  misc_feature (13)..(13): 2'-deoxy-2'-fluoro
  misc_feature (14)..(14): 2'-O-methyl
  misc_feature (15)..(15): 2'-deoxy-2'-fluoro
  misc_feature (16)..(17): 2'-O-methyl
  misc_feature (18)..(19): 2'-deoxy-2'-fluoro
  misc_feature (20)..(20): n is thymidine
  misc_feature (21)..(21): 3'-3 attached terminal deoxyabasic moiety
auguuagguccaugcaguunn

SEQ ID NO: 2225 - RNA, 21 nt, Artificial Sequence
  Description of Artificial Sequence:  siNA sense region
  misc_feature (1)..(2): 2'-O-methyl
  misc_feature (3)..(3): 2'-deoxy-2'-fluoro
  misc_feature (4)..(4): 2'-O-methyl
  misc_feature (5)..(6): 2'-deoxy-2'-fluoro
  misc_feature (7)..(9): 2'-O-methyl
  misc_feature (10)..(12): 2'-deoxy-2'-fluoro
  misc_feature (13)..(13): 2'-O-methyl
  misc_feature (14)..(14): 2'-deoxy-2'-fluoro
  misc_feature (15)..(15): 2'-O-methyl
  misc_feature (16)..(16): 2'-deoxy-2'-fluoro
  misc_feature (17)..(18): 2'-O-methyl
  misc_feature (19)..(19): 2'-deoxy-2'-fluoro
  misc_feature (20)..(20): n is thymidine
  misc_feature (21)..(21): 3'-3 attached terminal deoxyabasic moiety
aauguuagguccaugcagunn

SEQ ID NO: 2226 - RNA, 21 nt, Artificial Sequence
  Description of Artificial Sequence:  siNA sense region
  misc_feature (1)..(3): 2'-O-methyl
  misc_feature (4)..(4): 2'-deoxy-2'-fluoro
  misc_feature (5)..(5): 2'-O-methyl
  misc_feature (6)..(7): 2'-deoxy-2'-fluoro
  misc_feature (8)..(10): 2'-O-methyl
  misc_feature (11)..(13): 2'-deoxy-2'-fluoro
  misc_feature (14)..(14): 2'-O-methyl
  misc_feature (15)..(15): 2'-deoxy-2'-fluoro
  misc_feature (16)..(16): 2'-O-methyl
  misc_feature (17)..(17): 2'-deoxy-2'-fluoro
  misc_feature (18)..(19): 2'-O-methyl
  misc_feature (20)..(20): n is thymidine
  misc_feature (21)..(21): 3'-3 attached terminal deoxyabasic moiety
gaauguuagguccaugcagnn

SEQ ID NO: 2227 - RNA, 21 nt, Artificial Sequence
  Description of Artificial Sequence:  siNA sense region
  misc_feature (1)..(2): 2'-deoxy-2'-fluoro
  misc_feature (3)..(5): 2'-O-methyl
  misc_feature (6)..(6): 2'-deoxy-2'-fluoro
  misc_feature (7)..(7): 2'-O-methyl
  misc_feature (8)..(9): 2'-deoxy-2'-fluoro
  misc_feature (10)..(12): 2'-O-methyl
  misc_feature (13)..(15): 2'-deoxy-2'-fluoro
  misc_feature (16)..(16): 2'-O-methyl
  misc_feature (17)..(17): 2'-deoxy-2'-fluoro
  misc_feature (18)..(18): 2'-O-methyl
  misc_feature (19)..(19): 2'-deoxy-2'-fluoro
  misc_feature (20)..(20): n is thymidine
  misc_feature (21)..(21): 3'-3 attached terminal deoxyabasic moiety
ucgaauguuagguccaugcnn

SEQ ID NO: 2228 - RNA, 21 nt, Artificial Sequence
  Description of Artificial Sequence:  siNA sense region
  misc_feature (1)..(2): 2'-O-methyl
  misc_feature (3)..(4): 2'-deoxy-2'-fluoro
  misc_feature (5)..(7): 2'-O-methyl
  misc_feature (8)..(8): 2'-deoxy-2'-fluoro
  misc_feature (9)..(9): 2'-O-methyl
  misc_feature (10)..(11): 2'-deoxy-2'-fluoro
  misc_feature (12)..(14): 2'-O-methyl
  misc_feature (15)..(17): 2'-deoxy-2'-fluoro
  misc_feature (18)..(18): 2'-O-methyl
  misc_feature (19)..(19): 2'-deoxy-2'-fluoro
  misc_feature (20)..(20): n is thymidine
  misc_feature (21)..(21): 3'-3 attached terminal deoxyabasic moiety
gaucgaauguuagguccaunn

SEQ ID NO: 2229 - RNA, 21 nt, Artificial Sequence
  Description of Artificial Sequence:  siNA sense region
  misc_feature (20)..(20): n is thymidine
  misc_feature (21)..(21): 3'-3 attached terminal deoxyabasic moiety
cuuugaaaagucgcggucann

SEQ ID NO: 2230 - RNA, 21 nt, Artificial Sequence
  Description of Artificial Sequence:  siNA sense region
  misc_feature (20)..(20): n is thymidine
  misc_feature (21)..(21): 3'-3 attached terminal deoxyabasic moiety
gguugaaguugcugagguunn

SEQ ID NO: 2231 - RNA, 21 nt, Artificial Sequence
  Description of Artificial Sequence:  siNA sense region
  misc_feature (20)..(20): n is thymidine
  misc_feature (21)..(21): 3'-3 attached terminal deoxyabasic moiety
ggguugaaguugcugaggunn

SEQ ID NO: 2232 - RNA, 21 nt, Artificial Sequence
  Description of Artificial Sequence:  siNA sense region
  misc_feature (20)..(20): n is thymidine
  misc_feature (21)..(21): 3'-3 attached terminal deoxyabasic moiety
ucaagguuuucacuuuuucnn

SEQ ID NO: 2233 - RNA, 21 nt, Artificial Sequence
  Description of Artificial Sequence:  siNA sense region
  misc_feature (20)..(20): n is thymidine
  misc_feature (21)..(21): 3'-3 attached terminal deoxyabasic moiety
uucaagguuuucacuuuuunn

SEQ ID NO: 2234 - RNA, 21 nt, Artificial Sequence
  Description of Artificial Sequence:  siNA sense region
  misc_feature (20)..(20): n is thymidine
  misc_feature (21)..(21): 3'-3 attached terminal deoxyabasic moiety
cugugccaccuguucccugnn

SEQ ID NO: 2235 - RNA, 21 nt, Artificial Sequence
  Description of Artificial Sequence:  siNA sense region
  misc_feature (20)..(20): n is thymidine
  misc_feature (21)..(21): 3'-3 attached terminal deoxyabasic moiety
acgugguucaugacuuucunn

SEQ ID NO: 2236 - RNA, 21 nt, Artificial Sequence
  Description of Artificial Sequence:  siNA sense region
  misc_feature (20)..(20): n is thymidine
  misc_feature (21)..(21): 3'-3 attached terminal deoxyabasic moiety
aacgugguucaugacuuucnn

SEQ ID NO: 2237 - RNA, 21 nt, Artificial Sequence
  Description of Artificial Sequence:  siNA sense region
  misc_feature (20)..(20): n is thymidine
  misc_feature (21)..(21): 3'-3 attached terminal deoxyabasic moiety
uuaacgugguucaugacuunn

SEQ ID NO: 2238 - RNA, 21 nt, Artificial Sequence
  Description of Artificial Sequence:  siNA sense region
  misc_feature (20)..(20): n is thymidine
  misc_feature (21)..(21): 3'-3 attached terminal deoxyabasic moiety
cuguuaacgugguucaugann

SEQ ID NO: 2239 - RNA, 21 nt, Artificial Sequence
  Description of Artificial Sequence:  siNA sense region
  misc_feature (20)..(20): n is thymidine
  misc_feature (21)..(21): 3'-3 attached terminal deoxyabasic moiety
gcaugaguuggcacccacunn

SEQ ID NO: 2240 - RNA, 21 nt, Artificial Sequence
  Description of Artificial Sequence:  siNA sense region
  misc_feature (20)..(20): n is thymidine
  misc_feature (21)..(21): 3'-3 attached terminal deoxyabasic moiety
gcguuagcaugaguuggcann

SEQ ID NO: 2241 - RNA, 21 nt, Artificial Sequence
  Description of Artificial Sequence:  siNA sense region
  misc_feature (20)..(20): n is thymidine
  misc_feature (21)..(21): 3'-3 attached terminal deoxyabasic moiety
ugcguuagcaugaguuggcnn

SEQ ID NO: 2242 - RNA, 21 nt, Artificial Sequence
  Description of Artificial Sequence:  siNA sense region
  misc_feature (20)..(20): n is thymidine
  misc_feature (21)..(21): 3'-3 attached terminal deoxyabasic moiety
gcugcguuagcaugaguugnn

SEQ ID NO: 2243 - RNA, 21 nt, Artificial Sequence
  Description of Artificial Sequence:  siNA sense region
  misc_feature (20)..(20): n is thymidine
  misc_feature (21)..(21): 3'-3 attached terminal deoxyabasic moiety
ugcugcguuagcaugaguunn

SEQ ID NO: 2244 - RNA, 21 nt, Artificial Sequence
  Description of Artificial Sequence:  siNA sense region
  misc_feature (20)..(20): n is thymidine
  misc_feature (21)..(21): 3'-3 attached terminal deoxyabasic moiety
cugcugcguuagcaugagunn

SEQ ID NO: 2245 - RNA, 21 nt, Artificial Sequence
  Description of Artificial Sequence:  siNA sense region
  misc_feature (20)..(20): n is thymidine
  misc_feature (21)..(21): 3'-3 attached terminal deoxyabasic moiety
augcaguucuuggucaaugnn

SEQ ID NO: 2246 - RNA, 21 nt, Artificial Sequence
  Description of Artificial Sequence:  siNA sense region
  misc_feature (20)..(20): n is thymidine
  misc_feature (21)..(21): 3'-3 attached terminal deoxyabasic moiety
caugcaguucuuggucaaunn

SEQ ID NO: 2247 - RNA, 21 nt, Artificial Sequence
  Description of Artificial Sequence:  siNA sense region
  misc_feature (20)..(20): n is thymidine
  misc_feature (21)..(21): 3'-3 attached terminal deoxyabasic moiety
ccaugcaguucuuggucaann

SEQ ID NO: 2248 - RNA, 21 nt, Artificial Sequence
  Description of Artificial Sequence:  siNA sense region
  misc_feature (20)..(20): n is thymidine
  misc_feature (21)..(21): 3'-3 attached terminal deoxyabasic moiety
uccaugcaguucuuggucann

SEQ ID NO: 2249 - RNA, 21 nt, Artificial Sequence
  Description of Artificial Sequence:  siNA sense region
  misc_feature (20)..(20): n is thymidine
  misc_feature (21)..(21): 3'-3 attached terminal deoxyabasic moiety
gguccaugcaguucuuggunn

SEQ ID NO: 2250 - RNA, 21 nt, Artificial Sequence
  Description of Artificial Sequence:  siNA sense region
  misc_feature (20)..(20): n is thymidine
  misc_feature (21)..(21): 3'-3 attached terminal deoxyabasic moiety
uagguccaugcaguucuugnn

SEQ ID NO: 2251 - RNA, 21 nt, Artificial Sequence
  Description of Artificial Sequence:  siNA sense region
  misc_feature (20)..(20): n is thymidine
  misc_feature (21)..(21): 3'-3 attached terminal deoxyabasic moiety
guuagguccaugcaguucunn

SEQ ID NO: 2252 - RNA, 21 nt, Artificial Sequence
  Description of Artificial Sequence:  siNA sense region
  misc_feature (20)..(20): n is thymidine
  misc_feature (21)..(21): 3'-3 attached terminal deoxyabasic moiety
auguuagguccaugcaguunn

SEQ ID NO: 2253 - RNA, 21 nt, Artificial Sequence
  Description of Artificial Sequence:  siNA sense region
  misc_feature (20)..(20): n is thymidine
  misc_feature (21)..(21): 3'-3 attached terminal deoxyabasic moiety
aauguuagguccaugcagunn

SEQ ID NO: 2254 - RNA, 21 nt, Artificial Sequence
  Description of Artificial Sequence:  siNA sense region
  misc_feature (20)..(20): n is thymidine
  misc_feature (21)..(21): 3'-3 attached terminal deoxyabasic moiety
gaauguuagguccaugcagnn

SEQ ID NO: 2255 - RNA, 21 nt, Artificial Sequence
  Description of Artificial Sequence:  siNA sense region
  misc_feature (20)..(20): n is thymidine
  misc_feature (21)..(21): 3'-3 attached terminal deoxyabasic moiety
ucgaauguuagguccaugcnn

SEQ ID NO: 2256 - RNA, 21 nt, Artificial Sequence
  Description of Artificial Sequence:  siNA sense region
  misc_feature (20)..(20): n is thymidine
  misc_feature (21)..(21): 3'-3 attached terminal deoxyabasic moiety
gaucgaauguuagguccaunn

SEQ ID NO: 2257 - RNA, 21 nt, Artificial Sequence
  Description of Artificial Sequence:  siNA sense region
  misc_feature (1)..(1): 2'-O-methyl
  misc_feature (2)..(3): 2'-deoxy-2'-fluoro
  misc_feature (4)..(4): 2'-O-methyl
  misc_feature (5)..(5): 2'-deoxy-2'-fluoro
  misc_feature (6)..(6): 2'-O-methyl
  misc_feature (7)..(7): 2'-deoxy-2'-fluoro
  misc_feature (8)..(10): 2'-O-methyl
  misc_feature (11)..(13): 2'-deoxy-2'-fluoro
  misc_feature (14)..(15): 2'-O-methyl
  misc_feature (16)..(16): 2'-deoxy-2'-fluoro
  misc_feature (17)..(17): 2'-O-methyl
  misc_feature (18)..(19): 2'-deoxy-2'-fluoro
  misc_feature (20)..(21): internucleotide phosphorothioate linkage
acugcauggaccuaacauunn

SEQ ID NO: 2258 - RNA, 21 nt, Artificial Sequence
  Description of Artificial Sequence:  siNA sense region
  misc_feature (1)..(1): 2'-O-methyl
  misc_feature (2)..(2): 2'-deoxy-2'-fluoro
  misc_feature (3)..(3): 2'-O-methyl
  misc_feature (4)..(4): 2'-deoxy-2'-fluoro
  misc_feature (5)..(7): 2'-O-methyl
  misc_feature (8)..(10): 2'-deoxy-2'-fluoro
  misc_feature (11)..(12): 2'-O-methyl
  misc_feature (13)..(13): 2'-deoxy-2'-fluoro
  misc_feature (14)..(14): 2'-O-methyl
  misc_feature (15)..(17): 2'-deoxy-2'-fluoro
  misc_feature (18)..(19): 2'-O-methyl
  misc_feature (20)..(21): internucleotide phosphorothioate linkage
gcauggaccuaacauucgann

SEQ ID NO: 2259 - RNA, 21 nt, Artificial Sequence
  Description of Artificial Sequence:  siNA sense region
  misc_feature (1)..(1): 5'-3 attached terminal deoxyabasic moiety
  misc_feature (1)..(1): 2'-O-methyl
  misc_feature (4)..(4): 2'-O-methyl
  misc_feature (6)..(6): 2'-O-methyl
  misc_feature (8)..(10): 2'-O-methyl
  misc_feature (14)..(15): 2'-O-methyl
  misc_feature (17)..(17): 2'-O-methyl
  misc_feature (20)..(20): n is thymidine
  misc_feature (21)..(21): 3'-3 attached terminal deoxyabasic moiety
acugcauggaccuaacauunn

SEQ ID NO: 2260 - RNA, 21 nt, Artificial Sequence
  Description of Artificial Sequence:  siNA sense region
  misc_feature (1)..(1): 5'-3 attached terminal deoxyabasic moiety
  misc_feature (1)..(1): 2'-O-methyl
  misc_feature (3)..(3): 2'-O-methyl
  misc_feature (7)..(7): 2'-O-methyl
  misc_feature (11)..(12): 2'-O-methyl
  misc_feature (14)..(14): 2'-O-methyl
  misc_feature (18)..(19): 2'-O-methyl
  misc_feature (20)..(20): n is thymidine
  misc_feature (21)..(21): 3'-3 attached terminal deoxyabasic moiety
gcauggaccuaacauucgann

SEQ ID NO: 2261 - RNA, 21 nt, Artificial Sequence
  Description of Artificial Sequence:  siNA sense region
  misc_feature (1)..(1): 5'-3 attached terminal deoxyabasic moiety
  misc_feature (1)..(3): deoxy
  misc_feature (4)..(7): 2'-deoxy-2'-fluoro
  misc_feature (8)..(12): deoxy
  misc_feature (13)..(13): 2'-deoxy-2'-fluoro
  misc_feature (14)..(19): deoxy
  misc_feature (20)..(20): n is thymidine
  misc_feature (21)..(21): 3'-3 attached terminal deoxyabasic moiety
aaguuccaaaagugaaaaann

SEQ ID NO: 2262 - RNA, 21 nt, Artificial Sequence
  Description of Artificial Sequence:  siNA sense region
  misc_feature (1)..(1): 5'-3 attached terminal deoxyabasic moiety
  misc_feature (1)..(2): deoxy
  misc_feature (3)..(3): 2'-deoxy-2'-fluoro
  misc_feature (4)..(5): deoxy
  misc_feature (6)..(6): 2'-deoxy-2'-fluoro
  misc_feature (7)..(7): deoxy
  misc_feature (8)..(8): 2'-deoxy-2'-fluoro
  misc_feature (9)..(10): deoxy
  misc_feature (11)..(12): 2'-deoxy-2'-fluoro
  misc_feature (13)..(13): deoxy
  misc_feature (14)..(14): 2'-deoxy-2'-fluoro
  misc_feature (15)..(15): deoxy
  misc_feature (16)..(18): 2'-deoxy-2'-fluoro
  misc_feature (19)..(19): deoxy
  misc_feature (20)..(20): n is thymidine
  misc_feature (21)..(21): 3'-3 attached terminal deoxyabasic moiety
gacgacgcaaucguacucann

SEQ ID NO: 2263 - RNA, 21 nt, Artificial Sequence
  Description of Artificial Sequence:  siNA sense region
  misc_feature (1)..(1): 5'-3 attached terminal deoxyabasic moiety
  misc_feature (1)..(2): deoxy
  misc_feature (3)..(3): 2'-deoxy-2'-fluoro
  misc_feature (4)..(4): deoxy
  misc_feature (5)..(5): 2'-deoxy-2'-fluoro
  misc_feature (6)..(6): deoxy
  misc_feature (7)..(8): 2'-deoxy-2'-fluoro
  misc_feature (9)..(13): deoxy
  misc_feature (14)..(15): 2'-deoxy-2'-fluoro
  misc_feature (16)..(17): deoxy
  misc_feature (18)..(19): 2'-deoxy-2'-fluoro
  misc_feature (20)..(20): n is thymidine
  misc_feature (21)..(21): 3'-3 attached terminal deoxyabasic moiety
gguacgucaagaaccaguunn

SEQ ID NO: 2264 - RNA, 21 nt, Artificial Sequence
  Description of Artificial Sequence:  siNA sense region
  misc_feature (1)..(1): 5'-3 attached terminal deoxyabasic moiety
  misc_feature (1)..(1): deoxy
  misc_feature (2)..(4): 2'-deoxy-2'-fluoro
  misc_feature (5)..(7): deoxy
  misc_feature (8)..(8): 2'-deoxy-2'-fluoro
  misc_feature (9)..(9): deoxy
  misc_feature (10)..(10): 2'-deoxy-2'-fluoro
  misc_feature (11)..(11): deoxy
  misc_feature (12)..(13): 2'-deoxy-2'-fluoro
  misc_feature (14)..(18): deoxy
  misc_feature (19)..(19): 2'-deoxy-2'-fluoro
  misc_feature (20)..(20): n is thymidine
  misc_feature (21)..(21): 3'-3 attached terminal deoxyabasic moiety
auccagguacgucaagaacnn

SEQ ID NO: 2265 - RNA, 21 nt, Artificial Sequence
  Description of Artificial Sequence:  siNA sense region
  misc_feature (1)..(1): 5'-3 attached terminal deoxyabasic moiety
  misc_feature (1)..(2): 2'-deoxy-2'-fluoro
  misc_feature (3)..(3): deoxy
  misc_feature (4)..(4): 2'-deoxy-2'-fluoro
  misc_feature (5)..(6): deoxy
  misc_feature (7)..(9): 2'-deoxy-2'-fluoro
  misc_feature (10)..(12): deoxy
  misc_feature (13)..(13): 2'-deoxy-2'-fluoro
  misc_feature (14)..(14): deoxy
  misc_feature (15)..(15): 2'-deoxy-2'-fluoro
  misc_feature (16)..(16): deoxy
  misc_feature (17)..(18): 2'-deoxy-2'-fluoro
  misc_feature (19)..(19): deoxy
  misc_feature (20)..(20): n is thymidine
  misc_feature (21)..(21): 3'-3 attached terminal deoxyabasic moiety
uuacaauccagguacgucann

SEQ ID NO: 2266 - RNA, 21 nt, Artificial Sequence
  Description of Artificial Sequence:  siNA sense region
  misc_feature (1)..(1): 5'-3 attached terminal deoxyabasic moiety
  misc_feature (1)..(3): 2'-deoxy-2'-fluoro
  misc_feature (4)..(4): deoxy
  misc_feature (5)..(5): 2'-deoxy-2'-fluoro
  misc_feature (6)..(7): deoxy
  misc_feature (8)..(10): 2'-deoxy-2'-fluoro
  misc_feature (11)..(13): deoxy
  misc_feature (14)..(14): 2'-deoxy-2'-fluoro
  misc_feature (15)..(15): deoxy
  misc_feature (16)..(16): 2'-deoxy-2'-fluoro
  misc_feature (17)..(17): deoxy
  misc_feature (18)..(19): 2'-deoxy-2'-fluoro
  misc_feature (20)..(20): n is thymidine
  misc_feature (21)..(21): 3'-3 attached terminal deoxyabasic moiety
cuuacaauccagguacgucnn

SEQ ID NO: 2267 - RNA, 21 nt, Artificial Sequence
  Description of Artificial Sequence:  siNA sense region
  misc_feature (1)..(1): 5'-3 attached terminal deoxyabasic moiety
  misc_feature (1)..(2): deoxy
  misc_feature (3)..(5): 2'-deoxy-2'-fluoro
  misc_feature (6)..(6): deoxy
  misc_feature (7)..(7): 2'-deoxy-2'-fluoro
  misc_feature (8)..(9): deoxy
  misc_feature (10)..(12): 2'-deoxy-2'-fluoro
  misc_feature (13)..(15): deoxy
  misc_feature (16)..(16): 2'-deoxy-2'-fluoro
  misc_feature (17)..(17): deoxy
  misc_feature (18)..(18): 2'-deoxy-2'-fluoro
  misc_feature (19)..(19): deoxy
  misc_feature (20)..(20): n is thymidine
  misc_feature (21)..(21): 3'-3 attached terminal deoxyabasic moiety
agcuuacaauccagguacgnn

SEQ ID NO: 2268 - RNA, 21 nt, Artificial Sequence
  Description of Artificial Sequence:  siNA sense region
  misc_feature (1)..(1): 5'-3 attached terminal deoxyabasic moiety
  misc_feature (1)..(2): 2'-deoxy-2'-fluoro
  misc_feature (3)..(4): deoxy
  misc_feature (5)..(7): 2'-deoxy-2'-fluoro
  misc_feature (8)..(8): deoxy
  misc_feature (9)..(9): 2'-deoxy-2'-fluoro
  misc_feature (10)..(11): deoxy
  misc_feature (12)..(14): 2'-deoxy-2'-fluoro
  misc_feature (15)..(17): deoxy
  misc_feature (18)..(18): 2'-deoxy-2'-fluoro
  misc_feature (19)..(19): deoxy
  misc_feature (20)..(20): n is thymidine
  misc_feature (21)..(21): 3'-3 attached terminal deoxyabasic moiety
cuagcuuacaauccagguann

SEQ ID NO: 2269 - RNA, 21 nt, Artificial Sequence
  Description of Artificial Sequence:  siNA sense region
  misc_feature (1)..(6): 2'-deoxy-2'-fluoro
  misc_feature (7)..(7): 2'-O-methyl
  misc_feature (8)..(12): 2'-deoxy-2'-fluoro
  misc_feature (13)..(16): 2'-O-methyl
  misc_feature (17)..(19): 2'-deoxy-2'-fluoro
  misc_feature (20)..(21): internucleotide phosphorothioate linkage
uuuuucacuuuuggaacuunn

SEQ ID NO: 2270 - RNA, 21 nt, Artificial Sequence
  Description of Artificial Sequence:  siNA sense region
  misc_feature (1)..(1): 2'-deoxy-2'-fluoro
  misc_feature (2)..(4): 2'-O-methyl
  misc_feature (5)..(5): 2'-deoxy-2'-fluoro
  misc_feature (6)..(6): 2'-O-methyl
  misc_feature (7)..(7): 2'-deoxy-2'-fluoro
  misc_feature (8)..(9): 2'-O-methyl
  misc_feature (10)..(11): 2'-deoxy-2'-fluoro
  misc_feature (12)..(12): 2'-O-methyl
  misc_feature (13)..(13): 2'-deoxy-2'-fluoro
  misc_feature (14)..(14): 2'-O-methyl
  misc_feature (15)..(16): 2'-deoxy-2'-fluoro
  misc_feature (17)..(17): 2'-O-methyl
  misc_feature (18)..(19): 2'-deoxy-2'-fluoro
  misc_feature (20)..(21): internucleotide phosphorothioate linkage
ugaguacgauugcgucgucnn

SEQ ID NO: 2271 - RNA, 21 nt, Artificial Sequence
  Description of Artificial Sequence:  siNA sense region
  misc_feature (1)..(2): 2'-O-methyl
  misc_feature (3)..(4): 2'-deoxy-2'-fluoro
  misc_feature (5)..(6): 2'-O-methyl
  misc_feature (7)..(11): 2'-deoxy-2'-fluoro
  misc_feature (12)..(13): 2'-O-methyl
  misc_feature (14)..(14): 2'-deoxy-2'-fluoro
  misc_feature (15)..(15): 2'-O-methyl
  misc_feature (16)..(16): 2'-deoxy-2'-fluoro
  misc_feature (17)..(17): 2'-O-methyl
  misc_feature (18)..(19): 2'-deoxy-2'-fluoro
  misc_feature (20)..(21): internucleotide phosphorothioate linkage
aacugguucuugacguaccnn

SEQ ID NO: 2272 - RNA, 21 nt, Artificial Sequence
  Description of Artificial Sequence:  siNA sense region
  misc_feature (1)..(1): 2'-O-methyl
  misc_feature (2)..(6): 2'-deoxy-2'-fluoro
  misc_feature (7)..(8): 2'-O-methyl
  misc_feature (9)..(9): 2'-deoxy-2'-fluoro
  misc_feature (10)..(10): 2'-O-methyl
  misc_feature (11)..(11): 2'-deoxy-2'-fluoro
  misc_feature (12)..(12): 2'-O-methyl
  misc_feature (13)..(15): 2'-deoxy-2'-fluoro
  misc_feature (16)..(18): 2'-O-methyl
  misc_feature (19)..(19): 2'-deoxy-2'-fluoro
  misc_feature (20)..(21): internucleotide phosphorothioate linkage
guucuugacguaccuggaunn

SEQ ID NO: 2273 - RNA, 21 nt, Artificial Sequence
  Description of Artificial Sequence:  siNA sense region
  misc_feature (1)..(1): 2'-deoxy-2'-fluoro
  misc_feature (2)..(3): 2'-O-methyl
  misc_feature (4)..(4): 2'-deoxy-2'-fluoro
  misc_feature (5)..(5): 2'-O-methyl
  misc_feature (6)..(6): 2'-deoxy-2'-fluoro
  misc_feature (7)..(7): 2'-O-methyl
  misc_feature (8)..(10): 2'-deoxy-2'-fluoro
  misc_feature (11)..(13): 2'-O-methyl
  misc_feature (14)..(15): 2'-deoxy-2'-fluoro
  misc_feature (16)..(16): 2'-O-methyl
  misc_feature (17)..(17): 2'-deoxy-2'-fluoro
  misc_feature (18)..(19): 2'-O-methyl
  misc_feature (20)..(21): internucleotide phosphorothioate linkage
ugacguaccuggauuguaann

SEQ ID NO: 2274 - RNA, 21 nt, Artificial Sequence
  Description of Artificial Sequence:  siNA sense region
  misc_feature (1)..(2): 2'-O-methyl
  misc_feature (3)..(3): 2'-deoxy-2'-fluoro
  misc_feature (4)..(4): 2'-O-methyl
  misc_feature (5)..(5): 2'-deoxy-2'-fluoro
  misc_feature (6)..(6): 2'-O-methyl
  misc_feature (7)..(9): 2'-deoxy-2'-fluoro
  misc_feature (10)..(12): 2'-O-methyl
  misc_feature (13)..(14): 2'-deoxy-2'-fluoro
  misc_feature (15)..(15): 2'-O-methyl
  misc_feature (16)..(16): 2'-deoxy-2'-fluoro
  misc_feature (17)..(19): 2'-O-methyl
  misc_feature (20)..(21): internucleotide phosphorothioate linkage
gacguaccuggauuguaagnn

SEQ ID NO: 2275 - RNA, 21 nt, Artificial Sequence
  Description of Artificial Sequence:  siNA sense region
  misc_feature (1)..(1): 2'-deoxy-2'-fluoro
  misc_feature (2)..(2): 2'-O-methyl
  misc_feature (3)..(3): 2'-deoxy-2'-fluoro
  misc_feature (4)..(4): 2'-O-methyl
  misc_feature (5)..(7): 2'-deoxy-2'-fluoro
  misc_feature (8)..(10): 2'-O-methyl
  misc_feature (11)..(12): 2'-deoxy-2'-fluoro
  misc_feature (13)..(13): 2'-O-methyl
  misc_feature (14)..(14): 2'-deoxy-2'-fluoro
  misc_feature (15)..(17): 2'-O-methyl
  misc_feature (18)..(19): 2'-deoxy-2'-fluoro
  misc_feature (20)..(21): internucleotide phosphorothioate linkage
cguaccuggauuguaagcunn

SEQ ID NO: 2276 - RNA, 21 nt, Artificial Sequence
  Description of Artificial Sequence:  siNA sense region
  misc_feature (1)..(1): 2'-deoxy-2'-fluoro
  misc_feature (2)..(2): 2'-O-methyl
  misc_feature (3)..(5): 2'-deoxy-2'-fluoro
  misc_feature (6)..(8): 2'-O-methyl
  misc_feature (9)..(10): 2'-deoxy-2'-fluoro
  misc_feature (11)..(11): 2'-O-methyl
  misc_feature (12)..(12): 2'-deoxy-2'-fluoro
  misc_feature (13)..(15): 2'-O-methyl
  misc_feature (16)..(17): 2'-deoxy-2'-fluoro
  misc_feature (18)..(19): 2'-O-methyl
  misc_feature (20)..(21): internucleotide phosphorothioate linkage
uaccuggauuguaagcuagnn

SEQ ID NO: 2277 - RNA, 21 nt, Artificial Sequence
  Description of Artificial Sequence:  siNA sense region
  misc_feature (20)..(21): n is thymidine
uuacaauccagguacgucann

SEQ ID NO: 2278 - RNA, 21 nt, Artificial Sequence
  Description of Artificial Sequence:  siNA sense region
  misc_feature (20)..(21): n is thymidine
agcuuacaauccagguacgnn

SEQ ID NO: 2279 - RNA, 21 nt, Artificial Sequence
  Description of Artificial Sequence:  siNA sense region
  misc_feature (20)..(21): n is thymidine
ugacguaccuggauuguaann

SEQ ID NO: 2280 - RNA, 21 nt, Artificial Sequence
  Description of Artificial Sequence:  siNA sense region
  misc_feature (20)..(21): n is thymidine
cguaccuggauuguaagcunn

SEQ ID NO: 2281 - RNA, 21 nt, Artificial Sequence
  Description of Artificial Sequence:  siNA sense region
  misc_feature (1)..(1): 5'-3 attached terminal deoxyabasic moiety
  misc_feature (1)..(2): 2'-deoxy-2'-fluoro
  misc_feature (4)..(4): 2'-deoxy-2'-fluoro
  misc_feature (7)..(9): 2'-deoxy-2'-fluoro
  misc_feature (13)..(13): 2'-deoxy-2'-fluoro
  misc_feature (15)..(15): 2'-deoxy-2'-fluoro
  misc_feature (17)..(18): 2'-deoxy-2'-fluoro
  misc_feature (20)..(20): n is thymidine
  misc_feature (21)..(21): 3'-3 attached terminal deoxyabasic moiety
uuacaauccagguacgucann

SEQ ID NO: 2282 - RNA, 21 nt, Artificial Sequence
  Description of Artificial Sequence:  siNA sense region
  misc_feature (1)..(1): 5'-3 attached terminal deoxyabasic moiety
  misc_feature (3)..(5): 2'-deoxy-2'-fluoro
  misc_feature (7)..(7): 2'-deoxy-2'-fluoro
  misc_feature (10)..(12): 2'-deoxy-2'-fluoro
  misc_feature (16)..(16): 2'-deoxy-2'-fluoro
  misc_feature (18)..(18): 2'-deoxy-2'-fluoro
  misc_feature (20)..(20): n is thymidine
  misc_feature (21)..(21): 3'-3 attached terminal deoxyabasic moiety
agcuuacaauccagguacgnn

SEQ ID NO: 2283 - RNA, 21 nt, Artificial Sequence
  Description of Artificial Sequence:  siNA sense region
  misc_feature (1)..(1): 2'-deoxy-2'-fluoro
  misc_feature (4)..(4): 2'-deoxy-2'-fluoro
  misc_feature (6)..(6): 2'-deoxy-2'-fluoro
  misc_feature (8)..(10): 2'-deoxy-2'-fluoro
  misc_feature (14)..(15): 2'-deoxy-2'-fluoro
  misc_feature (17)..(17): 2'-deoxy-2'-fluoro
  misc_feature (20)..(21): internucleotide phosphorothioate linkage
ugacguaccuggauuguaann

SEQ ID NO: 2284 - RNA, 21 nt, Artificial Sequence
  Description of Artificial Sequence:  siNA sense region
  misc_feature (1)..(1): 2'-deoxy-2'-fluoro
  misc_feature (3)..(3): 2'-deoxy-2'-fluoro
  misc_feature (5)..(7): 2'-deoxy-2'-fluoro
  misc_feature (11)..(12): 2'-deoxy-2'-fluoro
  misc_feature (14)..(14): 2'-deoxy-2'-fluoro
  misc_feature (18)..(19): 2'-deoxy-2'-fluoro
  misc_feature (20)..(21): internucleotide phosphorothioate linkage
cguaccuggauuguaagcunn

SEQ ID NO: 2285 - RNA, 21 nt, Artificial Sequence
  Description of Artificial Sequence:  siNA sense region
  misc_feature (1)..(2): 2'-deoxy-2'-fluoro
  misc_feature (3)..(3): 2'-O-methyl
  misc_feature (4)..(4): 2'-deoxy-2'-fluoro
  misc_feature (5)..(6): 2'-O-methyl
  misc_feature (7)..(9): 2'-deoxy-2'-fluoro
  misc_feature (10)..(12): 2'-O-methyl
  misc_feature (13)..(13): 2'-deoxy-2'-fluoro
  misc_feature (14)..(14): 2'-O-methyl
  misc_feature (15)..(15): 2'-deoxy-2'-fluoro
  misc_feature (16)..(16): 2'-O-methyl
  misc_feature (17)..(18): 2'-deoxy-2'-fluoro
  misc_feature (19)..(19): 2'-O-methyl
  misc_feature (20)..(21): internucleotide phosphorothioate linkage
uuacaauccagguacgucann

SEQ ID NO: 2286 - RNA, 21 nt, Artificial Sequence
  Description of Artificial Sequence:  siNA sense region
  misc_feature (1)..(2): 2'-O-methyl
  misc_feature (3)..(5): 2'-deoxy-2'-fluoro
  misc_feature (6)..(6): 2'-O-methyl
  misc_feature (7)..(7): 2'-deoxy-2'-fluoro
  misc_feature (8)..(9): 2'-O-methyl
  misc_feature (10)..(12): 2'-deoxy-2'-fluoro
  misc_feature (13)..(15): 2'-O-methyl
  misc_feature (16)..(16): 2'-deoxy-2'-fluoro
  misc_feature (17)..(17): 2'-O-methyl
  misc_feature (18)..(18): 2'-deoxy-2'-fluoro
  misc_feature (19)..(19): 2'-O-methyl
  misc_feature (20)..(21): internucleotide phosphorothioate linkage
agcuuacaauccagguacgnn

SEQ ID NO: 2287 - RNA, 21 nt, Artificial Sequence
  Description of Artificial Sequence:  siNA sense region
  misc_feature (1)..(1): 5'-3 attached terminal deoxyabasic moiety
  misc_feature (20)..(20): n is thymidine
  misc_feature (21)..(21): 3'-3 attached terminal deoxyabasic moiety
uuacaauccagguacgucann

SEQ ID NO: 2288 - RNA, 21 nt, Artificial Sequence
  Description of Artificial Sequence:  siNA sense region
  misc_feature (1)..(1): 5'-3 attached terminal deoxyabasic moiety
  misc_feature (20)..(20): n is thymidine
  misc_feature (21)..(21): 3'-3 attached terminal deoxyabasic moiety
agcuuacaauccagguacgnn

SEQ ID NO: 2289 - RNA, 21 nt, Artificial Sequence
  Description of Artificial Sequence:  siNA sense region
  misc_feature (20)..(21): internucleotide phosphorothioate linkage
ugacguaccuggauuguaann

SEQ ID NO: 2290 - RNA, 21 nt, Artificial Sequence
  Description of Artificial Sequence:  siNA sense region
  misc_feature (20)..(21): internucleotide phosphorothioate linkage
cguaccuggauuguaagcunn

SEQ ID NO: 2291 - RNA, 21 nt, Artificial Sequence
  Description of Artificial Sequence:  siNA sense region
  misc_feature (1)..(1): 5'-3 attached terminal deoxyabasic moiety
  misc_feature (3)..(3): 2'-O-methyl
  misc_feature (5)..(6): 2'-O-methyl
  misc_feature (10)..(12): 2'-O-methyl
  misc_feature (14)..(14): 2'-O-methyl
  misc_feature (16)..(16): 2'-O-methyl
  misc_feature (19)..(19): 2'-O-methyl
  misc_feature (20)..(20): n is thymidine
  misc_feature (21)..(21): 3'-3 attached terminal deoxyabasic moiety
uuacaauccagguacgucann

SEQ ID NO: 2292 - RNA, 21 nt, Artificial Sequence
  Description of Artificial Sequence:  siNA sense region
  misc_feature (1)..(1): 5'-3 attached terminal deoxyabasic moiety
  misc_feature (1)..(2): 2'-O-methyl
  misc_feature (6)..(6): 2'-O-methyl
  misc_feature (8)..(9): 2'-O-methyl
  misc_feature (13)..(15): 2'-O-methyl
  misc_feature (17)..(17): 2'-O-methyl
  misc_feature (19)..(19): 2'-O-methyl
  misc_feature (20)..(20): n is thymidine
  misc_feature (21)..(21): 3'-3 attached terminal deoxyabasic moiety
agcuuacaauccagguacgnn

SEQ ID NO: 2293 - RNA, 21 nt, Artificial Sequence
  Description of Artificial Sequence:  siNA sense region
  misc_feature (1)..(1): 5'-3 attached terminal deoxyabasic moiety
  misc_feature (1)..(2): 2'-deoxy-2'-fluoro
  misc_feature (3)..(3): 2'-O-methyl
  misc_feature (4)..(4): 2'-deoxy-2'-fluoro
  misc_feature (5)..(6): 2'-O-methyl
  misc_feature (7)..(9): 2'-deoxy-2'-fluoro
  misc_feature (10)..(12): 2'-O-methyl
  misc_feature (13)..(13): 2'-deoxy-2'-fluoro
  misc_feature (14)..(14): 2'-O-methyl
  misc_feature (15)..(15): 2'-deoxy-2'-fluoro
  misc_feature (16)..(16): 2'-O-methyl
  misc_feature (17)..(18): 2'-deoxy-2'-fluoro
  misc_feature (19)..(19): 2'-O-methyl
  misc_feature (20)..(20): n is thymidine
  misc_feature (21)..(21): 3'-3 attached terminal deoxyabasic moiety
uuacaauccagguacgucann

SEQ ID NO: 2294 - RNA, 21 nt, Artificial Sequence
  Description of Artificial Sequence:  siNA sense region
  misc_feature (1)..(1): 5'-3 attached terminal deoxyabasic moiety
  misc_feature (1)..(2): 2'-O-methyl
  misc_feature (3)..(5): 2'-deoxy-2'-fluoro
  misc_feature (6)..(6): 2'-O-methyl
  misc_feature (7)..(7): 2'-deoxy-2'-fluoro
  misc_feature (8)..(9): 2'-O-methyl
  misc_feature (10)..(12): 2'-deoxy-2'-fluoro
  misc_feature (13)..(15): 2'-O-methyl
  misc_feature (16)..(16): 2'-deoxy-2'-fluoro
  misc_feature (17)..(17): 2'-O-methyl
  misc_feature (18)..(18): 2'-deoxy-2'-fluoro
  misc_feature (19)..(19): 2'-O-methyl
  misc_feature (20)..(20): n is thymidine
  misc_feature (21)..(21): 3'-3 attached terminal deoxyabasic moiety
agcuuacaauccagguacgnn

SEQ ID NO: 2295 - RNA, 21 nt, Artificial Sequence
  Description of Artificial Sequence:  siNA sense region
  misc_feature (1)..(1): 5'-3 attached terminal deoxyabasic moiety
  misc_feature (1)..(4): deoxy
  misc_feature (5)..(10): 2'-deoxy-2'-fluoro
  misc_feature (11)..(12): deoxy
  misc_feature (13)..(13): 2'-deoxy-2'-fluoro
  misc_feature (14)..(14): deoxy
  misc_feature (15)..(16): 2'-deoxy-2'-fluoro
  misc_feature (17)..(18): deoxy
  misc_feature (19)..(19): 2'-deoxy-2'-fluoro
  misc_feature (20)..(20): n is thymidine
  misc_feature (21)..(21): 3'-3 attached terminal deoxyabasic moiety
gaaacuuuucagcgccagunn

SEQ ID NO: 2296 - RNA, 21 nt, Artificial Sequence
  Description of Artificial Sequence:  siNA sense region
  misc_feature (1)..(1): 5'-3 attached terminal deoxyabasic moiety
  misc_feature (1)..(2): 2'-deoxy-2'-fluoro
  misc_feature (3)..(4): deoxy
  misc_feature (5)..(8): 2'-deoxy-2'-fluoro
  misc_feature (9)..(10): deoxy
  misc_feature (11)..(11): 2'-deoxy-2'-fluoro
  misc_feature (12)..(13): deoxy
  misc_feature (14)..(17): 2'-deoxy-2'-fluoro
  misc_feature (18)..(19): deoxy
  misc_feature (20)..(20): n is thymidine
  misc_feature (21)..(21): 3'-3 attached terminal deoxyabasic moiety
ccaacuucaacgacuccaann

SEQ ID NO: 2297 - RNA, 21 nt, Artificial Sequence
  Description of Artificial Sequence:  siNA sense region
  misc_feature (1)..(1): 5'-3 attached terminal deoxyabasic moiety
  misc_feature (1)..(3): 2'-deoxy-2'-fluoro
  misc_feature (4)..(5): deoxy
  misc_feature (6)..(9): 2'-deoxy-2'-fluoro
  misc_feature (10)..(11): deoxy
  misc_feature (12)..(12): 2'-deoxy-2'-fluoro
  misc_feature (13)..(14): deoxy
  misc_feature (15)..(18): 2'-deoxy-2'-fluoro
  misc_feature (19)..(19): deoxy
  misc_feature (20)..(20): n is thymidine
  misc_feature (21)..(21): 3'-3 attached terminal deoxyabasic moiety
cccaacuucaacgacuccann

SEQ ID NO: 2298 - RNA, 21 nt, Artificial Sequence
  Description of Artificial Sequence:  siNA sense region
  misc_feature (1)..(1): 5'-3 attached terminal deoxyabasic moiety
  misc_feature (1)..(2): deoxy
  misc_feature (3)..(6): 2'-deoxy-2'-fluoro
  misc_feature (7)..(11): deoxy
  misc_feature (12)..(12): 2'-deoxy-2'-fluoro
  misc_feature (13)..(19): deoxy
  misc_feature (20)..(20): n is thymidine
  misc_feature (21)..(21): 3'-3 attached terminal deoxyabasic moiety
aguuccaaaagugaaaaagnn

SEQ ID NO: 2299 - RNA, 21 nt, Artificial Sequence
  Description of Artificial Sequence:  siNA sense region
  misc_feature (1)..(1): 5'-3 attached terminal deoxyabasic moiety
  misc_feature (1)..(2): deoxy
  misc_feature (3)..(3): 2'-deoxy-2'-fluoro
  misc_feature (4)..(4): deoxy
  misc_feature (5)..(5): 2'-deoxy-2'-fluoro
  misc_feature (6)..(7): deoxy
  misc_feature (8)..(8): 2'-deoxy-2'-fluoro
  misc_feature (9)..(11): deoxy
  misc_feature (12)..(12): 2'-deoxy-2'-fluoro
  misc_feature (13)..(18): deoxy
  misc_feature (19)..(19): 2'-deoxy-2'-fluoro
  misc_feature (20)..(20): n is thymidine
  misc_feature (21)..(21): 3'-3 attached terminal deoxyabasic moiety
gacacgguggacaagggacnn

SEQ ID NO: 2300 - RNA, 21 nt, Artificial Sequence
  Description of Artificial Sequence:  siNA sense region
  misc_feature (1)..(1): 5'-3 attached terminal deoxyabasic moiety
  misc_feature (1)..(1): 2'-deoxy-2'-fluoro
  misc_feature (2)..(2): deoxy
  misc_feature (3)..(3): 2'-deoxy-2'-fluoro
  misc_feature (4)..(4): deoxy
  misc_feature (5)..(6): 2'-deoxy-2'-fluoro
  misc_feature (7)..(9): deoxy
  misc_feature (10)..(10): 2'-deoxy-2'-fluoro
  misc_feature (11)..(11): deoxy
  misc_feature (12)..(13): 2'-deoxy-2'-fluoro
  misc_feature (14)..(19): deoxy
  misc_feature (20)..(20): n is thymidine
  misc_feature (21)..(21): 3'-3 attached terminal deoxyabasic moiety
ugcaccaaguacugaaagann

SEQ ID NO: 2301 - RNA, 21 nt, Artificial Sequence
  Description of Artificial Sequence:  siNA sense region
  misc_feature (1)..(1): 5'-3 attached terminal deoxyabasic moiety
  misc_feature (1)..(2): 2'-deoxy-2'-fluoro
  misc_feature (3)..(3): deoxy
  misc_feature (4)..(4): 2'-deoxy-2'-fluoro
  misc_feature (5)..(5): deoxy
  misc_feature (6)..(7): 2'-deoxy-2'-fluoro
  misc_feature (8)..(10): deoxy
  misc_feature (11)..(11): 2'-deoxy-2'-fluoro
  misc_feature (12)..(12): deoxy
  misc_feature (13)..(14): 2'-deoxy-2'-fluoro
  misc_feature (15)..(19): deoxy
  misc_feature (20)..(20): n is thymidine
  misc_feature (21)..(21): 3'-3 attached terminal deoxyabasic moiety
uugcaccaaguacugaaagnn

SEQ ID NO: 2302 - RNA, 21 nt, Artificial Sequence
  Description of Artificial Sequence:  siNA sense region
  misc_feature (1)..(1): 5'-3 attached terminal deoxyabasic moiety
  misc_feature (1)..(2): deoxy
  misc_feature (3)..(4): 2'-deoxy-2'-fluoro
  misc_feature (5)..(5): deoxy
  misc_feature (6)..(6): 2'-deoxy-2'-fluoro
  misc_feature (7)..(7): deoxy
  misc_feature (8)..(9): 2'-deoxy-2'-fluoro
  misc_feature (10)..(12): deoxy
  misc_feature (13)..(13): 2'-deoxy-2'-fluoro
  misc_feature (14)..(14): deoxy
  misc_feature (15)..(16): 2'-deoxy-2'-fluoro
  misc_feature (17)..(19): deoxy
  misc_feature (20)..(20): n is thymidine
  misc_feature (21)..(21): 3'-3 attached terminal deoxyabasic moiety
aauugcaccaaguacugaann

SEQ ID NO: 2303 - RNA, 21 nt, Artificial Sequence
  Description of Artificial Sequence:  siNA sense region
  misc_feature (1)..(1): 5'-3 attached terminal deoxyabasic moiety
  misc_feature (1)..(2): deoxy
  misc_feature (3)..(3): 2'-deoxy-2'-fluoro
  misc_feature (4)..(5): deoxy
  misc_feature (6)..(7): 2'-deoxy-2'-fluoro
  misc_feature (8)..(8): deoxy
  misc_feature (9)..(9): 2'-deoxy-2'-fluoro
  misc_feature (10)..(10): deoxy
  misc_feature (11)..(12): 2'-deoxy-2'-fluoro
  misc_feature (13)..(15): deoxy
  misc_feature (16)..(16): 2'-deoxy-2'-fluoro
  misc_feature (17)..(17): deoxy
  misc_feature (18)..(19): 2'-deoxy-2'-fluoro
  misc_feature (20)..(20): n is thymidine
  misc_feature (21)..(21): 3'-3 attached terminal deoxyabasic moiety
gacaauugcaccaaguacunn

SEQ ID NO: 2304 - RNA, 21 nt, Artificial Sequence
  Description of Artificial Sequence:  siNA sense region
  misc_feature (1)..(1): 5'-3 attached terminal deoxyabasic moiety
  misc_feature (1)..(1): 2'-deoxy-2'-fluoro
  misc_feature (2)..(2): deoxy
  misc_feature (3)..(3): 2'-deoxy-2'-fluoro
  misc_feature (4)..(4): deoxy
  misc_feature (5)..(7): 2'-deoxy-2'-fluoro
  misc_feature (8)..(9): deoxy
  misc_feature (10)..(11): 2'-deoxy-2'-fluoro
  misc_feature (12)..(12): deoxy
  misc_feature (13)..(13): 2'-deoxy-2'-fluoro
  misc_feature (14)..(16): deoxy
  misc_feature (17)..(17): 2'-deoxy-2'-fluoro
  misc_feature (18)..(19): deoxy
  misc_feature (20)..(20): n is thymidine
  misc_feature (21)..(21): 3'-3 attached terminal deoxyabasic moiety
cguacucaaccgugggugann

SEQ ID NO: 2305 - RNA, 21 nt, Artificial Sequence
  Description of Artificial Sequence:  siNA sense region
  misc_feature (1)..(1): 5'-3 attached terminal deoxyabasic moiety
  misc_feature (1)..(1): 2'-deoxy-2'-fluoro
  misc_feature (2)..(2): deoxy
  misc_feature (3)..(3): 2'-deoxy-2'-fluoro
  misc_feature (4)..(5): deoxy
  misc_feature (6)..(7): 2'-deoxy-2'-fluoro
  misc_feature (8)..(8): deoxy
  misc_feature (9)..(9): 2'-deoxy-2'-fluoro
  misc_feature (10)..(10): deoxy
  misc_feature (11)..(13): 2'-deoxy-2'-fluoro
  misc_feature (14)..(15): deoxy
  misc_feature (16)..(17): 2'-deoxy-2'-fluoro
  misc_feature (18)..(18): deoxy
  misc_feature (19)..(19): 2'-deoxy-2'-fluoro
  misc_feature (20)..(20): n is thymidine
  misc_feature (21)..(21): 3'-3 attached terminal deoxyabasic moiety
cgcaaucguacucaaccgunn

SEQ ID NO: 2306 - RNA, 21 nt, Artificial Sequence
  Description of Artificial Sequence:  siNA sense region
  misc_feature (1)..(1): 5'-3 attached terminal deoxyabasic moiety
  misc_feature (1)..(1): deoxy
  misc_feature (2)..(2): 2'-deoxy-2'-fluoro
  misc_feature (3)..(3): deoxy
  misc_feature (4)..(4): 2'-deoxy-2'-fluoro
  misc_feature (5)..(6): deoxy
  misc_feature (7)..(8): 2'-deoxy-2'-fluoro
  misc_feature (9)..(9): deoxy
  misc_feature (10)..(10): 2'-deoxy-2'-fluoro
  misc_feature (11)..(11): deoxy
  misc_feature (12)..(14): 2'-deoxy-2'-fluoro
  misc_feature (15)..(16): deoxy
  misc_feature (17)..(18): 2'-deoxy-2'-fluoro
  misc_feature (19)..(19): deoxy
  misc_feature (20)..(20): n is thymidine
  misc_feature (21)..(21): 3'-3 attached terminal deoxyabasic moiety
acgcaaucguacucaaccgnn

SEQ ID NO: 2307 - RNA, 21 nt, Artificial Sequence
  Description of Artificial Sequence:  siNA sense region
  misc_feature (1)..(1): 5'-3 attached terminal deoxyabasic moiety
  misc_feature (1)..(1): 2'-deoxy-2'-fluoro
  misc_feature (2)..(3): deoxy
  misc_feature (4)..(4): 2'-deoxy-2'-fluoro
  misc_feature (5)..(5): deoxy
  misc_feature (6)..(6): 2'-deoxy-2'-fluoro
  misc_feature (7)..(8): deoxy
  misc_feature (9)..(10): 2'-deoxy-2'-fluoro
  misc_feature (11)..(11): deoxy
  misc_feature (12)..(12): 2'-deoxy-2'-fluoro
  misc_feature (13)..(13): deoxy
  misc_feature (14)..(16): 2'-deoxy-2'-fluoro
  misc_feature (17)..(18): deoxy
  misc_feature (19)..(19): 2'-deoxy-2'-fluoro
  misc_feature (20)..(20): n is thymidine
  misc_feature (21)..(21): 3'-3 attached terminal deoxyabasic moiety
cgacgcaaucguacucaacnn

SEQ ID NO: 2308 - RNA, 21 nt, Artificial Sequence
  Description of Artificial Sequence:  siNA sense region
  misc_feature (1)..(1): 5'-3 attached terminal deoxyabasic moiety
  misc_feature (1)..(1): deoxy
  misc_feature (2)..(2): 2'-deoxy-2'-fluoro
  misc_feature (3)..(4): deoxy
  misc_feature (5)..(5): 2'-deoxy-2'-fluoro
  misc_feature (6)..(6): deoxy
  misc_feature (7)..(7): 2'-deoxy-2'-fluoro
  misc_feature (8)..(9): deoxy
  misc_feature (10)..(11): 2'-deoxy-2'-fluoro
  misc_feature (12)..(12): deoxy
  misc_feature (13)..(13): 2'-deoxy-2'-fluoro
  misc_feature (14)..(14): deoxy
  misc_feature (15)..(17): 2'-deoxy-2'-fluoro
  misc_feature (18)..(19): deoxy
  misc_feature (20)..(20): n is thymidine
  misc_feature (21)..(21): 3'-3 attached terminal deoxyabasic moiety
acgacgcaaucguacucaann

SEQ ID NO: 2309 - RNA, 21 nt, Artificial Sequence
  Description of Artificial Sequence:  siNA sense region
  misc_feature (1)..(1): 5'-3 attached terminal deoxyabasic moiety
  misc_feature (1)..(1): 2'-deoxy-2'-fluoro
  misc_feature (2)..(2): deoxy
  misc_feature (3)..(3): 2'-deoxy-2'-fluoro
  misc_feature (4)..(4): deoxy
  misc_feature (5)..(6): 2'-deoxy-2'-fluoro
  misc_feature (7)..(11): deoxy
  misc_feature (12)..(13): 2'-deoxy-2'-fluoro
  misc_feature (14)..(15): deoxy
  misc_feature (15)..(16): 2'-deoxy-2'-fluoro
  misc_feature (18)..(18): deoxy
  misc_feature (19)..(19): 2'-deoxy-2'-fluoro
  misc_feature (20)..(20): n is thymidine
  misc_feature (21)..(21): 3'-3 attached terminal deoxyabasic moiety
uacgucaagaaccaguuacnn

SEQ ID NO: 2310 - RNA, 21 nt, Artificial Sequence
  Description of Artificial Sequence:  siNA sense region
  misc_feature (1)..(1): 5'-3 attached terminal deoxyabasic moiety
  misc_feature (1)..(1): deoxy
  misc_feature (2)..(2): 2'-deoxy-2'-fluoro
  misc_feature (3)..(3): deoxy
  misc_feature (4)..(4): 2'-deoxy-2'-fluoro
  misc_feature (5)..(5): deoxy
  misc_feature (6)..(7): 2'-deoxy-2'-fluoro
  misc_feature (8)..(12): deoxy
  misc_feature (13)..(14): 2'-deoxy-2'-fluoro
  misc_feature (15)..(16): deoxy
  misc_feature (17)..(18): 2'-deoxy-2'-fluoro
  misc_feature (19)..(19): deoxy
  misc_feature (20)..(20): n is thymidine
  misc_feature (21)..(21): 3'-3 attached terminal deoxyabasic moiety
guacgucaagaaccaguuann

SEQ ID NO: 2311 - RNA, 21 nt, Artificial Sequence
  Description of Artificial Sequence:  siNA sense region
  misc_feature (1)..(1): 5'-3 attached terminal deoxyabasic moiety
  misc_feature (1)..(3): deoxy
  misc_feature (4)..(4): 2'-deoxy-2'-fluoro
  misc_feature (5)..(5): deoxy
  misc_feature (6)..(6): 2'-deoxy-2'-fluoro
  misc_feature (7)..(7): deoxy
  misc_feature (8)..(9): 2'-deoxy-2'-fluoro
  misc_feature (10)..(14): deoxy
  misc_feature (15)..(16): 2'-deoxy-2'-fluoro
  misc_feature (17)..(18): deoxy
  misc_feature (19)..(19): 2'-deoxy-2'-fluoro
  misc_feature (20)..(20): n is thymidine
  misc_feature (21)..(21): 3'-3 attached terminal deoxyabasic moiety
agguacgucaagaaccagunn

SEQ ID NO: 2312 - RNA, 21 nt, Artificial Sequence
  Description of Artificial Sequence:  siNA sense region
  misc_feature (1)..(1): 5'-3 attached terminal deoxyabasic moiety
  misc_feature (1)..(2): 2'-deoxy-2'-fluoro
  misc_feature (3)..(5): deoxy
  misc_feature (6)..(6): 2'-deoxy-2'-fluoro
  misc_feature (7)..(7): deoxy
  misc_feature (8)..(8): 2'-deoxy-2'-fluoro
  misc_feature (9)..(9): deoxy
  misc_feature (10)..(11): 2'-deoxy-2'-fluoro
  misc_feature (12)..(16): deoxy
  misc_feature (17)..(18): 2'-deoxy-2'-fluoro
  misc_feature (19)..(19): deoxy
  misc_feature (20)..(20): n is thymidine
  misc_feature (21)..(21): 3'-3 attached terminal deoxyabasic moiety
ccagguacgucaagaaccann

SEQ ID NO: 2313 - RNA, 21 nt, Artificial Sequence
  Description of Artificial Sequence:  siNA sense region
  misc_feature (1)..(1): 5'-3 attached terminal deoxyabasic moiety
  misc_feature (1)..(1): 2'-deoxy-2'-fluoro
  misc_feature (2)..(3): deoxy
  misc_feature (4)..(6): 2'-deoxy-2'-fluoro
  misc_feature (7)..(9): deoxy
  misc_feature (10)..(12): 2'-deoxy-2'-fluoro
  misc_feature (11)..(11): deoxy
  misc_feature (13)..(13): deoxy
  misc_feature (14)..(15): 2'-deoxy-2'-fluoro
  misc_feature (16)..(19): deoxy
  misc_feature (20)..(20): n is thymidine
  misc_feature (21)..(21): 3'-3 attached terminal deoxyabasic moiety
caauccagguacgucaagann

SEQ ID NO: 2314 - RNA, 21 nt, Artificial Sequence
  Description of Artificial Sequence:  siNA sense region
  misc_feature (1)..(1): 5'-3 attached terminal deoxyabasic moiety
  misc_feature (1)..(1): 2'-deoxy-2'-fluoro
  misc_feature (2)..(2): deoxy
  misc_feature (3)..(3): 2'-deoxy-2'-fluoro
  misc_feature (4)..(5): deoxy
  misc_feature (6)..(8): 2'-deoxy-2'-fluoro
  misc_feature (9)..(11): deoxy
  misc_feature (12)..(12): 2'-deoxy-2'-fluoro
  misc_feature (13)..(13): deoxy
  misc_feature (14)..(14): 2'-deoxy-2'-fluoro
  misc_feature (15)..(15): deoxy
  misc_feature (16)..(17): 2'-deoxy-2'-fluoro
  misc_feature (18)..(19): deoxy
  misc_feature (20)..(20): n is thymidine
  misc_feature (21)..(21): 3'-3 attached terminal deoxyabasic moiety
uacaauccagguacgucaann

SEQ ID NO: 2315 - RNA, 21 nt, Artificial Sequence
  Description of Artificial Sequence:  siNA sense region
  misc_feature (1)..(1): 2'-O-methyl
  misc_feature (2)..(3): 2'-deoxy-2'-fluoro
  misc_feature (4)..(5): 2'-O-methyl
  misc_feature (6)..(6): 2'-deoxy-2'-fluoro
  misc_feature (7)..(7): 2'-O-methyl
  misc_feature (8)..(9): 2'-deoxy-2'-fluoro
  misc_feature (10)..(15): 2'-O-methyl
  misc_feature (16)..(19): 2'-deoxy-2'-fluoro
  misc_feature (20)..(21): internucleotide phosphorothioate linkage
acuggcgcugaaaaguuucnn

SEQ ID NO: 2316 - RNA, 21 nt, Artificial Sequence
  Description of Artificial Sequence:  siNA sense region
  misc_feature (1)..(2): 2'-deoxy-2'-fluoro
  misc_feature (3)..(6): 2'-O-methyl
  misc_feature (7)..(8): 2'-deoxy-2'-fluoro
  misc_feature (9)..(9): 2'-O-methyl
  misc_feature (10)..(11): 2'-deoxy-2'-fluoro
  misc_feature (12)..(15): 2'-O-methyl
  misc_feature (16)..(17): 2'-deoxy-2'-fluoro
  misc_feature (18)..(19): 2'-O-methyl
  misc_feature (20)..(21): internucleotide phosphorothioate linkage
uuggagucguugaaguuggnn

SEQ ID NO: 2317 - RNA, 21 nt, Artificial Sequence
  Description of Artificial Sequence:  siNA sense region
  misc_feature (1)..(1): 2'-deoxy-2'-fluoro
  misc_feature (2)..(5): 2'-O-methyl
  misc_feature (6)..(7): 2'-deoxy-2'-fluoro
  misc_feature (8)..(8): 2'-O-methyl
  misc_feature (9)..(10): 2'-deoxy-2'-fluoro
  misc_feature (11)..(14): 2'-O-methyl
  misc_feature (15)..(16): 2'-deoxy-2'-fluoro
  misc_feature (17)..(19): 2'-O-methyl
  misc_feature (20)..(21): internucleotide phosphorothioate linkage
uggagucguugaaguugggnn

SEQ ID NO: 2318 - RNA, 21 nt, Artificial Sequence
  Description of Artificial Sequence:  siNA sense region
  misc_feature (1)..(7): 2'-deoxy-2'-fluoro
  misc_feature (8)..(8): 2'-O-methyl
  misc_feature (9)..(13): 2'-deoxy-2'-fluoro
  misc_feature (14)..(17): 2'-O-methyl
  misc_feature (18)..(19): 2'-deoxy-2'-fluoro
  misc_feature (20)..(21): internucleotide phosphorothioate linkage
cuuuuucacuuuuggaacunn

SEQ ID NO: 2319 - RNA, 21 nt, Artificial Sequence
  Description of Artificial Sequence:  siNA sense region
  misc_feature (1)..(1): 2'-O-methyl
  misc_feature (2)..(7): 2'-deoxy-2'-fluoro
  misc_feature (8)..(8): 2'-O-methyl
  misc_feature (9)..(11): 2'-deoxy-2'-fluoro
  misc_feature (12)..(12): 2'-O-methyl
  misc_feature (13)..(14): 2'-deoxy-2'-fluoro
  misc_feature (15)..(15): 2'-O-methyl
  misc_feature (16)..(16): 2'-deoxy-2'-fluoro
  misc_feature (17)..(17): 2'-O-methyl
  misc_feature (18)..(19): 2'-deoxy-2'-fluoro
  misc_feature (20)..(21): internucleotide phosphorothioate linkage
gucccuuguccaccgugucnn

SEQ ID NO: 2320 - RNA, 21 nt, Artificial Sequence
  Description of Artificial Sequence:  siNA sense region
  misc_feature (1)..(6): 2'-deoxy-2'-fluoro
  misc_feature (7)..(8): 2'-O-methyl
  misc_feature (9)..(9): 2'-deoxy-2'-fluoro
  misc_feature (10)..(10): 2'-O-methyl
  misc_feature (11)..(13): 2'-deoxy-2'-fluoro
  misc_feature (14)..(15): 2'-O-methyl
  misc_feature (16)..(16): 2'-deoxy-2'-fluoro
  misc_feature (17)..(17): 2'-O-methyl
  misc_feature (18)..(18): 2'-deoxy-2'-fluoro
  misc_feature (19)..(19): 2'-O-methyl
  misc_feature (20)..(21): internucleotide phosphorothioate linkage
ucuuucaguacuuggugcann

SEQ ID NO: 2321 - RNA, 21 nt, Artificial Sequence
  Description of Artificial Sequence:  siNA sense region
  misc_feature (1)..(5): 2'-deoxy-2'-fluoro
  misc_feature (6)..(7): 2'-O-methyl
  misc_feature (8)..(8): 2'-deoxy-2'-fluoro
  misc_feature (9)..(9): 2'-O-methyl
  misc_feature (10)..(12): 2'-deoxy-2'-fluoro
  misc_feature (13)..(14): 2'-O-methyl
  misc_feature (15)..(15): 2'-deoxy-2'-fluoro
  misc_feature (16)..(16): 2'-O-methyl
  misc_feature (17)..(17): 2'-deoxy-2'-fluoro
  misc_feature (18)..(19): 2'-O-methyl
  misc_feature (20)..(21): internucleotide phosphorothioate linkage
cuuucaguacuuggugcaann

SEQ ID NO: 2322 - RNA, 21 nt, Artificial Sequence
  Description of Artificial Sequence:  siNA sense region
  misc_feature (1)..(3): 2'-deoxy-2'-fluoro
  misc_feature (4)..(5): 2'-O-methyl
  misc_feature (6)..(6): 2'-deoxy-2'-fluoro
  misc_feature (7)..(7): 2'-O-methyl
  misc_feature (8)..(10): 2'-deoxy-2'-fluoro
  misc_feature (11)..(12): 2'-O-methyl
  misc_feature (13)..(13): 2'-deoxy-2'-fluoro
  misc_feature (14)..(14): 2'-O-methyl
  misc_feature (15)..(15): 2'-deoxy-2'-fluoro
  misc_feature (16)..(17): 2'-O-methyl
  misc_feature (18)..(19): 2'-deoxy-2'-fluoro
  misc_feature (20)..(21): internucleotide phosphorothioate linkage
uucaguacuuggugcaauunn

SEQ ID NO: 2323 - RNA, 21 nt, Artificial Sequence
  Description of Artificial Sequence:  siNA sense region
  misc_feature (1)..(2): 2'-O-methyl
  misc_feature (3)..(3): 2'-deoxy-2'-fluoro
  misc_feature (4)..(4): 2'-O-methyl
  misc_feature (5)..(7): 2'-deoxy-2'-fluoro
  misc_feature (8)..(9): 2'-O-methyl
  misc_feature (10)..(10): 2'-deoxy-2'-fluoro
  misc_feature (11)..(11): 2'-O-methyl
  misc_feature (12)..(12): 2'-deoxy-2'-fluoro
  misc_feature (13)..(14): 2'-O-methyl
  misc_feature (15)..(16): 2'-deoxy-2'-fluoro
  misc_feature (17)..(17): 2'-O-methyl
  misc_feature (18)..(19): 2'-deoxy-2'-fluoro
  misc_feature (20)..(21): internucleotide phosphorothioate linkage
aguacuuggugcaauugucnn

SEQ ID NO: 2324 - RNA, 21 nt, Artificial Sequence
  Description of Artificial Sequence:  siNA sense region
  misc_feature (1)..(2): 2'-deoxy-2'-fluoro
  misc_feature (3)..(3): 2'-O-methyl
  misc_feature (4)..(6): 2'-deoxy-2'-fluoro
  misc_feature (7)..(7): 2'-O-methyl
  misc_feature (8)..(8): 2'-deoxy-2'-fluoro
  misc_feature (9)..(10): 2'-O-methyl
  misc_feature (11)..(12): 2'-deoxy-2'-fluoro
  misc_feature (13)..(15): 2'-O-methyl
  misc_feature (16)..(16): 2'-deoxy-2'-fluoro
  misc_feature (17)..(17): 2'-O-methyl
  misc_feature (18)..(18): 2'-deoxy-2'-fluoro
  misc_feature (19)..(19): 2'-O-methyl
  misc_feature (20)..(21): internucleotide phosphorothioate linkage
ucacccacgguugaguacgnn

SEQ ID NO: 2325 - RNA, 21 nt, Artificial Sequence
  Description of Artificial Sequence:  siNA sense region
  misc_feature (1)..(1): 2'-O-methyl
  misc_feature (2)..(2): 2'-deoxy-2'-fluoro
  misc_feature (3)..(4): 2'-O-methyl
  misc_feature (5)..(6): 2'-deoxy-2'-fluoro
  misc_feature (7)..(9): 2'-O-methyl
  misc_feature (10)..(10): 2'-deoxy-2'-fluoro
  misc_feature (11)..(11): 2'-O-methyl
  misc_feature (12)..(12): 2'-deoxy-2'-fluoro
  misc_feature (13)..(14): 2'-O-methyl
  misc_feature (15)..(16): 2'-deoxy-2'-fluoro
  misc_feature (17)..(17): 2'-O-methyl
  misc_feature (18)..(18): 2'-deoxy-2'-fluoro
  misc_feature (19)..(19): 2'-O-methyl
  misc_feature (20)..(21): internucleotide phosphorothioate linkage
acgguugaguacgauugcgnn

SEQ ID NO: 2326 - RNA, 21 nt, Artificial Sequence
  Description of Artificial Sequence:  siNA sense region
  misc_feature (1)..(1): 2'-deoxy-2'-fluoro
  misc_feature (2)..(3): 2'-O-methyl
  misc_feature (4)..(5): 2'-deoxy-2'-fluoro
  misc_feature (6)..(8): 2'-O-methyl
  misc_feature (9)..(9): 2'-deoxy-2'-fluoro
  misc_feature (10)..(10): 2'-O-methyl
  misc_feature (11)..(11): 2'-deoxy-2'-fluoro
  misc_feature (12)..(13): 2'-O-methyl
  misc_feature (14)..(15): 2'-deoxy-2'-fluoro
  misc_feature (16)..(16): 2'-O-methyl
  misc_feature (17)..(17): 2'-deoxy-2'-fluoro
  misc_feature (18)..(18): 2'-O-methyl
  misc_feature (19)..(19): 2'-deoxy-2'-fluoro
  misc_feature (20)..(21): internucleotide phosphorothioate linkage
cgguugaguacgauugcgunn

SEQ ID NO: 2327 - RNA, 21 nt, Artificial Sequence
  Description of Artificial Sequence:  siNA sense region
  misc_feature (1)..(1): 2'-O-methyl
  misc_feature (2)..(3): 2'-deoxy-2'-fluoro
  misc_feature (4)..(6): 2'-O-methyl
  misc_feature (7)..(7): 2'-deoxy-2'-fluoro
  misc_feature (8)..(8): 2'-O-methyl
  misc_feature (9)..(9): 2'-deoxy-2'-fluoro
  misc_feature (10)..(11): 2'-O-methyl
  misc_feature (12)..(13): 2'-deoxy-2'-fluoro
  misc_feature (14)..(14): 2'-O-methyl
  misc_feature (15)..(15): 2'-deoxy-2'-fluoro
  misc_feature (16)..(16): 2'-O-methyl
  misc_feature (17)..(18): 2'-deoxy-2'-fluoro
  misc_feature (19)..(19): 2'-O-methyl
  misc_feature (20)..(21): internucleotide phosphorothioate linkage
guugaguacgauugcgucgnn

SEQ ID NO: 2328 - RNA, 21 nt, Artificial Sequence
  Description of Artificial Sequence:  siNA sense region
  misc_feature (1)..(2): 2'-deoxy-2'-fluoro
  misc_feature (3)..(5): 2'-O-methyl
  misc_feature (6)..(6): 2'-deoxy-2'-fluoro
  misc_feature (7)..(7): 2'-O-methyl
  misc_feature (8)..(8): 2'-deoxy-2'-fluoro
  misc_feature (9)..(10): 2'-O-methyl
  misc_feature (11)..(12): 2'-deoxy-2'-fluoro
  misc_feature (13)..(13): 2'-O-methyl
  misc_feature (14)..(14): 2'-deoxy-2'-fluoro
  misc_feature (15)..(15): 2'-O-methyl
  misc_feature (16)..(17): 2'-deoxy-2'-fluoro
  misc_feature (18)..(18): 2'-O-methyl
  misc_feature (19)..(19): 2'-deoxy-2'-fluoro
  misc_feature (20)..(21): internucleotide phosphorothioate linkage
uugaguacgauugcgucgunn

SEQ ID NO: 2329 - RNA, 21 nt, Artificial Sequence
  Description of Artificial Sequence:  siNA sense region
  misc_feature (1)..(1): 2'-O-methyl
  misc_feature (2)..(2): 2'-deoxy-2'-fluoro
  misc_feature (3)..(4): 2'-O-methyl
  misc_feature (5)..(6): 2'-deoxy-2'-fluoro
  misc_feature (7)..(8): 2'-O-methyl
  misc_feature (9)..(13): 2'-deoxy-2'-fluoro
  misc_feature (14)..(15): 2'-O-methyl
  misc_feature (16)..(16): 2'-deoxy-2'-fluoro
  misc_feature (17)..(17): 2'-O-methyl
  misc_feature (18)..(18): 2'-deoxy-2'-fluoro
  misc_feature (19)..(19): 2'-O-methyl
  misc_feature (20)..(21): internucleotide phosphorothioate linkage
guaacugguucuugacguann

SEQ ID NO: 2330 - RNA, 21 nt, Artificial Sequence
  Description of Artificial Sequence:  siNA sense region
  misc_feature (1)..(1): 2'-deoxy-2'-fluoro
  misc_feature (2)..(3): 2'-O-methyl
  misc_feature (4)..(5): 2'-deoxy-2'-fluoro
  misc_feature (6)..(7): 2'-O-methyl
  misc_feature (8)..(12): 2'-deoxy-2'-fluoro
  misc_feature (13)..(14): 2'-O-methyl
  misc_feature (15)..(15): 2'-deoxy-2'-fluoro
  misc_feature (16)..(16): 2'-O-methyl
  misc_feature (17)..(17): 2'-deoxy-2'-fluoro
  misc_feature (18)..(18): 2'-O-methyl
  misc_feature (19)..(19): 2'-deoxy-2'-fluoro
  misc_feature (20)..(21): internucleotide phosphorothioate linkage
uaacugguucuugacguacnn

SEQ ID NO: 2331 - RNA, 21 nt, Artificial Sequence
  Description of Artificial Sequence:  siNA sense region
  misc_feature (1)..(1): 2'-O-methyl
  misc_feature (2)..(3): 2'-deoxy-2'-fluoro
  misc_feature (4)..(5): 2'-O-methyl
  misc_feature (6)..(10): 2'-deoxy-2'-fluoro
  misc_feature (11)..(12): 2'-O-methyl
  misc_feature (13)..(13): 2'-deoxy-2'-fluoro
  misc_feature (14)..(14): 2'-O-methyl
  misc_feature (15)..(15): 2'-deoxy-2'-fluoro
  misc_feature (16)..(16): 2'-O-methyl
  misc_feature (17)..(19): 2'-deoxy-2'-fluoro
  misc_feature (20)..(21): internucleotide phosphorothioate linkage
acugguucuugacguaccunn

SEQ ID NO: 2332 - RNA, 21 nt, Artificial Sequence
  Description of Artificial Sequence:  siNA sense region
  misc_feature (1)..(1): 2'-deoxy-2'-fluoro
  misc_feature (2)..(3): 2'-O-methyl
  misc_feature (4)..(8): 2'-deoxy-2'-fluoro
  misc_feature (9)..(10): 2'-O-methyl
  misc_feature (11)..(11): 2'-deoxy-2'-fluoro
  misc_feature (12)..(12): 2'-O-methyl
  misc_feature (13)..(13): 2'-deoxy-2'-fluoro
  misc_feature (14)..(14): 2'-O-methyl
  misc_feature (15)..(17): 2'-deoxy-2'-fluoro
  misc_feature (18)..(19): 2'-O-methyl
  misc_feature (20)..(21): internucleotide phosphorothioate linkage
ugguucuugacguaccuggnn

SEQ ID NO: 2333 - RNA, 21 nt, Artificial Sequence
  Description of Artificial Sequence:  siNA sense region
  misc_feature (1)..(4): 2'-deoxy-2'-fluoro
  misc_feature (5)..(6): 2'-O-methyl
  misc_feature (7)..(7): 2'-deoxy-2'-fluoro
  misc_feature (8)..(8): 2'-O-methyl
  misc_feature (9)..(9): 2'-deoxy-2'-fluoro
  misc_feature (10)..(10): 2'-O-methyl
  misc_feature (11)..(13): 2'-deoxy-2'-fluoro
  misc_feature (14)..(16): 2'-O-methyl
  misc_feature (17)..(18): 2'-deoxy-2'-fluoro
  misc_feature (19)..(19): 2'-O-methyl
  misc_feature (20)..(21): internucleotide phosphorothioate linkage
ucuugacguaccuggauugnn

SEQ ID NO: 2334 - RNA, 21 nt, Artificial Sequence
  Description of Artificial Sequence:  siNA sense region
  misc_feature (1)..(2): 2'-deoxy-2'-fluoro
  misc_feature (3)..(4): 2'-O-methyl
  misc_feature (5)..(5): 2'-deoxy-2'-fluoro
  misc_feature (6)..(6): 2'-O-methyl
  misc_feature (7)..(7): 2'-deoxy-2'-fluoro
  misc_feature (8)..(8): 2'-O-methyl
  misc_feature (9)..(11): 2'-deoxy-2'-fluoro
  misc_feature (12)..(14): 2'-O-methyl
  misc_feature (15)..(16): 2'-deoxy-2'-fluoro
  misc_feature (17)..(17): 2'-O-methyl
  misc_feature (18)..(18): 2'-deoxy-2'-fluoro
  misc_feature (19)..(19): 2'-O-methyl
  misc_feature (20)..(21): internucleotide phosphorothioate linkage
uugacguaccuggauuguann

SEQ ID NO: 2335 - RNA, 21 nt, Artificial Sequence
  Description of Artificial Sequence:  siNA sense region
  misc_feature (1)..(1): 5'-3 attached terminal deoxyabasic moiety
  misc_feature (20)..(20): n is thymidine
  misc_feature (21)..(21): 3'-3 attached terminal deoxyabasic moiety
ugcaccaaguacugaaagann

SEQ ID NO: 2336 - RNA, 21 nt, Artificial Sequence
  Description of Artificial Sequence:  siNA sense region
  misc_feature (1)..(1): 5'-3 attached terminal deoxyabasic moiety
  misc_feature (20)..(20): n is thymidine
  misc_feature (21)..(21): 3'-3 attached terminal deoxyabasic moiety
aauugcaccaaguacugaann

SEQ ID NO: 2337 - RNA, 21 nt, Artificial Sequence
  Description of Artificial Sequence:  siNA sense region
  misc_feature (20)..(21): internucleotide phosphorothioate linkage
ucuuucaguacuuggugcann

SEQ ID NO: 2338 - RNA, 21 nt, Artificial Sequence
  Description of Artificial Sequence:  siNA sense region
  misc_feature (20)..(21): internucleotide phosphorothioate linkage
uucaguacuuggugcaauunn

SEQ ID NO: 2339 - RNA, 21 nt, Artificial Sequence
  Description of Artificial Sequence:  siNA sense region
  misc_feature (1)..(19): n stands for any ribonucleotide
  misc_feature (1)..(1): 5'-3 attached terminal moiety
  misc_feature (21)..(21): 3'-3 attached terminal moiety
  misc_feature (20)..(21): n stands for any nucleotide
nnnnnnnnnnnnnnnnnnnnn

SEQ ID NO: 2340 - RNA, 21 nt, Artificial Sequence
  Description of Artificial Sequence:  siNA antisense region
  misc_feature (20)..(20): Phosphorothioate 3'-Intenucleotide Linkage
  misc_feature (1)..(19): n stands for any ribonucleotide
  misc_feature (20)..(21): n stands for any nucleotide
  misc_feature (21)..(21): 3'-3 attached terminal glyceryl moiety
nnnnnnnnnnnnnnnnnnnnn

SEQ ID NO: 2341 - RNA, 21 nt, Artificial Sequence
  Description of Artificial Sequence:  siNA sense region
  misc_feature (1)..(19): n stands for any nucleotide wherein any pyrimidine nucleotide present is 2'-Fluoro and purine 2'-O-methyl
  misc_feature (20)..(21): internucleotide phosphorothioate linkage
  misc_feature (20)..(21): n stands for any nucleotide
nnnnnnnnnnnnnnnnnnnnn

SEQ ID NO: 2342 - RNA, 21 nt, Artificial Sequence
  Description of Artificial Sequence:  siNA antisense region
  misc_feature (1)..(19): n stands for any nucleotide wherein any pyrimidine nucleotide present is 2'-Fluoro and purine 2'-O-methyl
  misc_feature (20)..(21): n stands for any nucleotide
  misc_feature (20)..(21): internucleotide phosphorothioate linkage
  misc_feature (21)..(21): 3'-3 attached terminal glyceryl moiety
nnnnnnnnnnnnnnnnnnnnn

SEQ ID NO: 2343 - RNA, 21 nt, Artificial Sequence
  Description of Artificial Sequence:  siNA sense region
  misc_feature (1)..(19): n stands for any nucleotide wherein any pyrimidine nucleotide present is 2'-O-methyl or 2'-Fluoro
  misc_feature (20)..(21): n stands for any nucleotide
  misc_feature (1)..(1): 5'-3 attached terminal deoxyabasic moiety
  misc_feature (21)..(21): 3'-3 attached terminal deoxyabasic moiety
nnnnnnnnnnnnnnnnnnnnn

SEQ ID NO: 2344 - RNA, 21 nt, Artificial Sequence
  Description of Artificial Sequence:  siNA antisense region
  misc_feature (1)..(19): n stands for any nucleotide wherein any pyrimidine nucleotide present is 2'-Fluoro
  misc_feature (20)..(20): Phosphorothioate 3'-Internucleotide Linkage
  misc_feature (20)..(21): n stands for any nucleotide
  misc_feature (21)..(21): 3'-3 attached terminal glyceryl moiety
nnnnnnnnnnnnnnnnnnnnn

SEQ ID NO: 2345 - RNA, 21 nt, Artificial Sequence
  Description of Artificial Sequence:  siNA sense region
  misc_feature (1)..(19): n stands for any nucleotide wherein any pyrimidine nucleotide present is 2'-Fluoro and any purine is 2'-Deoxy
  misc_feature (20)..(21): n stands for any nucleotide
  misc_feature (1)..(1): 5'-3 attached terminal deoxyabasic moiety
  misc_feature (21)..(21): 3'-3 attached terminal deoxyabasic moiety
nnnnnnnnnnnnnnnnnnnnn

SEQ ID NO: 2346 - RNA, 21 nt, Artificial Sequence
  Description of Artificial Sequence:  siNA sense region
  misc_feature (1)..(19): n stands for any nucleotide wherein any pyrimidine nucleotide present is 2'-Fluoro
  misc_feature (20)..(21): n stands for any nucleotide
  misc_feature (1)..(1): 5'-3 attached terminal deoxyabasic moiety
  misc_feature (21)..(21): 3'-3 attached terminal deoxyabasic moiety
nnnnnnnnnnnnnnnnnnnnn

SEQ ID NO: 2347 - RNA, 21 nt, Artificial Sequence
  Description of Artificial Sequence:  siNA antisense region
  misc_feature (1)..(19): n stands for any nucleotide wherein any pyrimidine nucleotide present is 2'-Fluoro and purine 2'-deoxy
  misc_feature (20)..(21): n stands for any nucleotide
  misc_feature (1)..(1): 5'-3 attached terminal deoxyabasic moiety
  misc_feature (21)..(21): 3'-3 attached terminal deoxyabasic moiety
  misc_feature (20)..(21): internucleotide phosphorothioate linkage
nnnnnnnnnnnnnnnnnnnnn

SEQ ID NO: 2348 - RNA, 21 nt, Artificial Sequence
  Description of Artificial Sequence:  siNA sense region
  misc_feature (1)..(1): 5'-3 attached terminal deoxyabasic moiety
  misc_feature (21)..(21): 3'-3 attached terminal deoxyabasic moiety
  misc_feature (20)..(21): n stands for thymidine
gccgcuucgagcggaugcunn

SEQ ID NO: 2349 - RNA, 21 nt, Artificial Sequence
  Description of Artificial Sequence:  siNA antisense region
  misc_feature (20)..(20): Phosphorothioate 3'-Internucleotide Linkage
  misc_feature (20)..(21): n stands for thymidine
  misc_feature (21)..(21): 3'-3 attached terminal glyceryl moiety
agcauccgcucgaagcggcnn

SEQ ID NO: 2350 - RNA, 21 nt, Artificial Sequence
  Description of Artificial Sequence:  siNA sense region
  misc_feature (1)..(1): 2'-O-methyl
  misc_feature (4)..(4): 2'-O-Methyl
  misc_feature (9)..(11): 2'-O-Methyl
  misc_feature (13)..(15): 2'-O-Methyl
  misc_feature (17)..(17): 2'-O-Methyl
  misc_feature (2)..(3): 2'-deoxy-2'-fluoro
  misc_feature (5)..(8): 2'-deoxy-2'-fluoro
  misc_feature (12)..(12): 2'-deoxy-2'-fluoro
  misc_feature (16)..(16): 2'-deoxy-2'-fluoro
  misc_feature (18)..(19): 2'-deoxy-2'-fluoro
  misc_feature (18)..(18): 2'-deoxy-2'-fluoro
  misc_feature (20)..(21): n stands for thymidine
gccgcuucgagcggaugcunn

SEQ ID NO: 2351 - RNA, 21 nt, Artificial Sequence
  Description of Artificial Sequence:  siNA antisense region
  misc_feature (1)..(2): 2'-O-Methyl
  misc_feature (4)..(4): 2'-O-Methyl
  misc_feature (8)..(8): 2'-O-Methyl
  misc_feature (12)..(15): 2'-O-Methyl
  misc_feature (17)..(18): 2'-O-Methyl
  misc_feature (3)..(3): 2'-deoxy-2'-fluoro
  misc_feature (5)..(7): 2'-deoxy-2'-fluoro
  misc_feature (9)..(11): 2'-deoxy-2'-fluoro
  misc_feature (16)..(16): 2'-deoxy-2'-fluoro
  misc_feature (19)..(19): 2'-deoxy-2'-fluoro
  misc_feature (20)..(21): n stands for thymidine
  misc_feature (20)..(20): Phosphorothioate 3'-Internucleotide Linkage
  misc_feature (21)..(21): 3'-3 attached terminal glyceryl moiety
agcauccgcucgaagcggcnn

SEQ ID NO: 2352 - RNA, 21 nt, Artificial Sequence
  Description of Artificial Sequence:  siNA sense region
  misc_feature (2)..(3): 2'-O-Methyl or 2'-deoxy-2'-fluoro
  misc_feature (5)..(8): 2'-O-Methyl or 2'-deoxy-2'-fluoro
  misc_feature (12)..(12): 2'-O-Methyl or 2'-deoxy-2'-fluoro
  misc_feature (15)..(16): 2'-O-Methyl or 2'-deoxy-2'-fluoro
  misc_feature (18)..(19): 2'-O-Methyl or 2'-deoxy-2'-fluoro
  misc_feature (1)..(1): 5'-3 attached terminal deoxyabasic moiety
  misc_feature (21)..(21): 3'-3 attached terminal deoxyabasic moiety
  misc_feature (20)..(21): n stands for thymidine
gccgcuucgagcggaugcunn

SEQ ID NO: 2353 - RNA, 21 nt, Artificial Sequence
  Description of Artificial Sequence:  siNA antisense region
  misc_feature (3)..(3): 2'-deoxy-2'-fluoro
  misc_feature (5)..(7): 2'-deoxy-2'-fluoro
  misc_feature (9)..(11): 2'-deoxy-2'-fluoro
  misc_feature (16)..(16): 2'-deoxy-2'-fluoro
  misc_feature (19)..(19): 2'-deoxy-2'-fluoro
  misc_feature (20)..(20): Phosphorothioate 3'-Internucleotide Linkage
  misc_feature (20)..(21): n stands for thymidine
  misc_feature (21)..(21): 3'-3 attached terminal glyceryl moiety
agcauccgcucgaagcggcnn

SEQ ID NO: 2354 - RNA, 21 nt, Artificial Sequence
  Description of Artificial Sequence:  siNA sense region
  misc_feature (1)..(1): 2'-deoxy
  misc_feature (4)..(4): 2'-deoxy
  misc_feature (9)..(11): 2'-deoxy
  misc_feature (13)..(14): 2'-deoxy
  misc_feature (17)..(17): 2'-deoxy
  misc_feature (2)..(3): 2'-deoxy-2'-fluoro
  misc_feature (5)..(8): 2'-deoxy-2'-fluoro
  misc_feature (12)..(12): 2'-deoxy-2'-fluoro
  misc_feature (15)..(16): 2'-deoxy-2'-fluoro
  misc_feature (18)..(19): 2'-deoxy-2'-fluoro
  misc_feature (1)..(1): 5'-3 attached terminal deoxyabasic moiety
  misc_feature (21)..(21): 3'-3 attached terminal deoxyabasic moiety
  misc_feature (20)..(21): n stands for thymidine
gccgcuucgagcggaugcunn

SEQ ID NO: 2355 - RNA, 21 nt, Artificial Sequence
  Description of Artificial Sequence:  siNA sense region
  misc_feature (2)..(3): 2'-deoxy-2'-fluoro
  misc_feature (5)..(8): 2'-deoxy-2'-fluoro
  misc_feature (12)..(12): 2'-deoxy-2'-fluoro
  misc_feature (16)..(16): 2'-deoxy-2'-fluoro
  misc_feature (18)..(19): 2'-deoxy-2'-fluoro
  misc_feature (1)..(1): 5'-3 attached terminal deoxyabasic moiety
  misc_feature (21)..(21): 3'-3 attached terminal deoxyabasic moiety
  misc_feature (20)..(21): n stands for thymidine
gccgcuucgagcggaugcunn

SEQ ID NO: 2356 - RNA, 21 nt, Artificial Sequence
  Description of Artificial Sequence:  siNA antisense region
  misc_feature (1)..(2): 2'-deoxy
  misc_feature (4)..(4): 2'-deoxy
  misc_feature (8)..(8): 2'-deoxy
  misc_feature (12)..(15): 2'-deoxy
  misc_feature (17)..(18): 2'-deoxy
  misc_feature (3)..(3): 2'-deoxy-2'-fluoro
  misc_feature (5)..(7): 2'-deoxy-2'-fluoro
  misc_feature (9)..(11): 2'-deoxy-2'-fluoro
  misc_feature (16)..(16): 2'-deoxy-2'-fluoro
  misc_feature (19)..(19): 2'-deoxy-2'-fluoro
  misc_feature (20)..(20): Phosphorothioate 3'-Internucleotide Linkage
  misc_feature (20)..(21): n stands for thymidine
  misc_feature (21)..(21): 3'-3 attached terminal glyceryl moiety
agcauccgcucgaagcggcnn

SEQ ID NO: 2357 - RNA, 14 nt, Artificial Sequence
  Description of Artificial Sequence:  Target Sequence
auauaucuauuucg

SEQ ID NO: 2358 - RNA, 14 nt, Artificial Sequence
  Description of Artificial Sequence:  Complement to Target Sequence
cgaaauaguauaua

SEQ ID NO: 2359 - RNA, 22 nt, Artificial Sequence
  Description of Artificial Sequence:  appended target/complement
cgaaauaguauauacuauuucg

SEQ ID NO: 2360 - RNA, 24 nt, Artificial Sequence
  Description of Artificial Sequence:  Duplex forming oligonucleotide
  misc_feature (23)..(24): n stands for thymidine
cgaaauaguauauacuauuucgnn
